United States Patent Application Publication US 2010/0144538 A1 - sequence listing, part 6

SEQ ID NO: 10486 - DNA, 531 bp, Homo sapiens
ggttctgtgtggtgtttcaccaacttcggcctatggctctgtctgacgtcaccgaagtgacggaacggaaaagcgcgagaagcggctcggttcccaccacggagaggcgggagtgagtcaactgacaagcgctggggacagtggcgtccttgtcttgcctttgtcgctcccgccccgctcttccctggctgggctggcggaggccttgctgatgaacctgactgagggtcccctggcgatggcagaaatggaccctacacagggccgtgtggtctttgaggacgtggccatatatttctcccaggaggagtgggggcaccttgatgaggctcagagattgctgtaccgtgatgtgatgctggagaatttggcccttttgtcctcactagggttcatagcagtggcagcaatgcttatggatgctggacaggattatatggtttttgaggacgtggccatacatttctcccaggaggagtggggaattcttaatgacgttcagagacacctgcacagcgatgtgatgctgga

SEQ ID NO: 10487 - protein, 105 aa, Homo sapiens
MNLTEGPLAMAEMDPTQGRVVFEDVAIYFSQEEWGHLDEAQRLLYRDVMLENLALLSSLGFIAVAAMLMDAGQDYMVFEDVAIHFSQEEWGILNDVQRHLHSDVM

SEQ ID NO: 10488 - DNA, 566 bp, Homo sapiens
ggttctgtgtggtgtttcaccaacttcggcctatggctctgtctgacgtcaccgaagtgacggaacggaaaagcgcgagaagcggctcggttcccaccacggagaggcgggagtgagtcaactgacaagcgctggggacagtggcgtccttgtcttgcctttgtcgctcccgccccgctcttccctggctgggctggcggaggccttgctgatgaacctgactgagggtcccctggcgatggcagaaatggaccctacacagggccgtgtggtctttgaggacgtggccatatatttctcccaggaggagtgggggcaccttgatgaggctcagagattgctgtaccgtgatgtgatgctggagaatttggcccttttgtcctcactaggattatatggtttttgaggacgtggccatacatttctcccaggaggagtggggaattcttaatgacgttcagagacacctgcacagcgatgtgatgctggagaactttgcacttttgtcctcagtaggttgttggcatggagccaaggatgaggaggcaccttccaagcaatgtgtt

SEQ ID NO: 10489 - protein, 64 aa, Homo sapiens
MNLTEGPLAMAEMDPTQGRVVFEDVAIYFSQEEWGHLDEAQRLLYRDVMLENLALLSSLGLYGF

SEQ ID NO: 10490 - DNA, 2376 bp, Homo sapiens
gagaagcggctcggttcccaccacggagaggcgggagtgagtcaactgacaagcgctggggacagtggcgtccttgtcttgcctttgtcgctcccgccccgctcttccctggctgggctggcggaggccttgctgatgaacctgactgaggtgggctctgtgttgagagaacagggggctgagacttgggggccagaccattggtggctccacagacatcatactctgtccagaacggtgcagacctggcataacagggattctggattgcatctgtaaaaagggaggcctggactggggtcccctggcgatggcagaaatggaccctacacagggccgtgtggtctttgaggacgtggccatatatttctcccaggaggagtgggggcaccttgatgaggctcagagattgctgtaccgtgatgtgatgctggagaatttggcccttttgtcctcactaggttcttggcatggagctgaggatgaggaggcaccttcacagcaaggtttttctgtaggagtgtcagaggttacagcttcaaagccctgtctgtccagccagaaggtccaccctagtgagacatgtggcccacccttgaaagacattctgtgcctggttgagcacaatggaattcatcctgagcaacacatatatatttgtgaggcagagctttttcagcacccaaagcagcaaattggagaaaatctttccagaggggatgattggataccttcatttgggaagaaccacagagttcacatggcagaggagatcttcacatgcatggagggctggaaggacttaccagccacctcatgccttctccagcaccagggccctcaaagcgagtggaagccatacagggacacagaggacagagaagcctttcagactggacaaaatgattacaaatgtagtgaatgtgggaaaaccttcacctgcagctattcatttgttgagcaccagaaaatccacacaggagaaaggtcttatgaatgtaacaaatgtgggaaattctttaagtacagtgccaatttcatgaaacatcagacagttcacactagtgaaaggacttatgagtgcagagaatgtggaaaatcctttatgtacaactaccgactcatgagacataagcgagttcacactggagaaaggccttatgagtgcaacacatgtgggaaattctttcggtacagctccacatttgttagacatcagagagttcacaccggagaaaggccgtatgagtgcagggaatgtgggaaattctttatggacagctccacactcattaaacatcagagagttcacaccggagaaagaccttataagtgcaatgattgtgggaaattttttaggtatatctccacactcattagacatcagagaattcacactggagaaaggccttatgagtgcagtgtatgtggggaattgtttaggtacaactccagccttgttaaacattggagaaatcacactggagaaaggccttataaatgcagtgaatgtgggaaatcatttaggtaccactgcaggctcattagacaccagagagtccacacgggagaaaggccttatgagtgcagcgaatgcgggaaattctttcgttacaactccaacctcattaaacattggagaaatcacactggagaaaggccttacgagtgcagagagtgtgggaaagcctttagccacaagcatatacttgttgagcaccagaaaatccacagtggagaaagaccttatgagtgcagcgaatgccagaaggcctttattagaaagtctcacctggttcatcaccagaaaatccacagtgaagagaggcttgtgtgctccatgaatgtggggaattctttagctaaaactccaacctcattaaacatcagagatttcacaatggagaaagtttaccattgactattgtaattgggtagtaatgttatataaattccacatttttatgcaactaatctccagaacatttttcctcttaccaagaagtaaaatgctgtacccattaacaacaactcattccccttccctacttccccagaaatgtctcaactatatttctatactctatggtacttatatgaggtaccaatagatatctatgaatttgatatatatttgtacctcatataagtggattctacagtatttatcttttgagactggcttatttcacttaggataaggtcttcacggttcacccatgttgtataatgtgtcagaatatccttcctttttaggtgaaataatattctatggtatttatataccacatttatttatccattcatctgttagtggatacttgggctacttccaccttttgcctattgaaataatgctgctatgaagatgagtgt

SEQ ID NO: 10491 - protein, 536 aa, Homo sapiens
MAEMDPTQGRVVFEDVAIYFSQEEWGHLDEAQRLLYRDVMLENLALLSSLGSWHGAEDEEAPSQQGFSVGVSEVTASKPCLSSQKVHPSETCGPPLKDILCLVEHNGIHPEQHIYICEAELFQHPKQQIGENLSRGDDWIPSFGKNHRVHMAEEIFTCMEGWKDLPATSCLLQHQGPQSEWKPYRDTEDREAFQTGQNDYKCSECGKTFTCSYSFVEHQKIHTGERSYECNKCGKFFKYSANFMKHQTVHTSERTYECRECGKSFMYNYRLMRHKRVHTGERPYECNTCGKFFRYSSTFVRHQRVHTGERPYECRECGKFFMDSSTLIKHQRVHTGERPYKCNDCGKFFRYISTLIRHQRIHTGERPYECSVCGELFRYNSSLVKHWRNHTGERPYKCSECGKSFRYHCRLIRHQRVHTGERPYECSECGKFFRYNSNLIKHWRNHTGERPYECRECGKAFSHKHILVEHQKIHSGERPYECSECQKAFIRKSHLVHHQKIHSEERLVCSMNVGNSLAKTPTSLNIRDFTMEKVYH

SEQ ID NO: 10492 - DNA, 1409 bp, Homo sapiens
aactgacaagcgctggggacagtggcgtccttgtcttgcctttgtcgctcccgccccgctcttccctggctgggctggcggaggccttgctgatgaacctgactgagggtcccctggcgatggcagaaatggaccctacacaggattatatggtttttgaggacgtggccatacatttctcccaggaggagtggggaattcttaatgacgttcagagacacctgcacagcgatgtgatgctggagaactttgcacttttgtcctcagtaggttgttggcatggagccaaggatgaggaggcaccttccaagcaatgtgtttctgtaggagtgtcacaggtcacaactttaaagccagctttgtccacccagaaggcccagccctgtgagacatgtagctcacttctgaaggacattctacacctggctgagcatgacggaacacaccccaagcgtacagccaagctttacctgcaccaaaaggagcatcttagagagaagctcaccagaagtgatgaagggaggccttcgtttgtgaatgacagtgttcacctggcaaagaggaacctcacatgcatgcagggtggcaaggattttactggtgattcagatcttcaacaacaggctcttcacagtgggtggaagccacacagggacactcatggtgtggaggcctttcaaagtggacagaataattacagctgcacccaatgtgggaaagacttttgccaccaacatacactgtttgagcaccagaaaatccacacagaggaaaggccttatgagtgcagtgaatgtggcaaattgtttaggtacaactccgaccttattaaacatcagcgaaatcatactggagaaaggccttataagtgtagtgaatgtggaaaagccttcagcctcaaatacaatgttgttcaacaccagaaaattcacactggagaaaggccttatgagtgcagtgaatgtgggaaagcttttcttagaaagtctcacctacttcagcaccagaggattcacaccaggccaaggccttatgtgtgtagtgaatgtgggaaggccttccttacacaggctcaccttgttggtcaccagaaaattcatactggagaacggccttatggatgcaatgaatgtgggaaatactttatgtacagttcagcactcattagacatcagaaagttcacactggagaaaggcctttttattgctgtgaatgtgggaaattctttatggacagctgcacactcattattcaccagagagttcatactggagaaaaaccttatgaatgcaacgaatgtgggaaattctttagataccgttccacactcattagacatcagaaagttcacactggagaaaagccttatgagtgtagtgaatgtgggaagttctttatggacacttcc

SEQ ID NO: 10493 - protein, 438 aa, Homo sapiens
MNLTEGPLAMAEMDPTQDYMVFEDVAIHFSQEEWGILNDVQRHLHSDVMLENFALLSSVGCWHGAKDEEAPSKQCVSVGVSQVTTLKPALSTQKAQPCETCSSLLKDILHLAEHDGTHPKRTAKLYLHQKEHLREKLTRSDEGRPSFVNDSVHLAKRNLTCMQGGKDFTGDSDLQQQALHSGWKPHRDTHGVEAFQSGQNNYSCTQCGKDFCHQHTLFEHQKIHTEERPYECSECGKLFRYNSDLIKHQRNHTGERPYKCSECGKAFSLKYNVVQHQKIHTGERPYECSECGKAFLRKSHLLQHQRIHTRPRPYVCSECGKAFLTQAHLVGHQKIHTGERPYGCNECGKYFMYSSALIRHQKVHTGERPFYCCECGKFFMDSCTLIIHQRVHTGEKPYECNECGKFFRYRSTLIRHQKVHTGEKPYECSECGKFFMDT

SEQ ID NO: 10494 - DNA, 2185 bp, Homo sapiens
gtggtaggggagatggaaacacatttggctgttagtttggccctgtgtttaatgggtggtaaatataagtagaaaatagagaacttaagtaaatacagcttgaaaagaagctgcttatgtattcatctttcccaatttggcagggccgtgtggtctttgaggacgtggccatatatttctcccaggaggagtgggggcaccttgatgaggctcagagattgctgtaccgtgatgtgatgctggagaatttggcccttttgtcctcactaggttcttggcatggagctgaggatgaggaggcaccttcacagcaaggtttttctgtaggagtgtcagaggttacagcttcaaagccctgtctgtccagccagaaggtccaccctagtgagacatgtggcccacccttgaaagacattctgtgcctggttgagcacaatggaattcatcctgagcaacacatatatatttgtgaggcagagctttttcagcacccaaagcagcaaattggagaaaatctttccagaggggatgattggataccttcatttgggaagaaccacagagttcacatggcagaggagatcttcacatgcatggagggctggaaggacttaccagccacctcatgccttctccagcaccagggccctcaaagcgagtggaagccatacagggacacagaggacagagaagcctttcagactggacaaaatgattacaaatgtagtgaatgtgggaaaaccttcacctgcagctattcatttgttgagcaccagaaaatccacacaggagaaaggtcttatgaatgtaacaaatgtgggaaattctttaagtacagtgccaatttcatgaaacatcagacagttcacactagtgaaaggacttatgagtgcagagaatgtggaaaatcctttatgtacaactaccgactcatgagacataagcgagttcacactggagaaaggccttatgagtgcaacacatgtgggaaattctttcggtacagctccacatttgttagacatcagagagttcacaccggagaaaggccgtatgagtgcagggaatgtgggaaattctttatggacagctccacactcattaaacatcagagagttcacaccggagaaagaccttataagtgcaatgattgtgggaaattttttaggtatatctccacactcattagacatcagagaattcacactggagaaaggccttatgagtgcagtgtatgtggggaattgtttaggtacaactccagccttgttaaacattggagaaatcacactggagaaaggccttataaatgcagtgaatgtgggaaatcatttaggtaccactgcaggctcattagacaccagagagtccacacgggagaaaggccttatgagtgcagcgaatgcgggaaattctttcgttacaactccaacctcattaaacattggagaaatcacactggagaaaggccttacgagtgcagagagtgtgggaaagcctttagccacaagcatatacttgttgagcaccagaaaatccacagtggagaaagaccttatgagtgcagcgaatgccagaaggcctttattagaaagtctcacctggttcatcaccagaaaatccacagtgaagagaggcttgtgtgctccatgaatgtggggaattctttagctaaaactccaacctcattaaacatcagagatttcacaatggagaaagtttaccattgactattgtaattgggtagtaatgttatataaattccacatttttatgcaactaatctccagaacatttttcctcttaccaagaagtaaaatgctgtacccattaacaacaactcattccccttccctacttccccagaaatgtctcaactatatttctatactctatggtacttatatgaggtaccaatagatatctatgaatttgatatatatttgtacctcatataagtggattctacagtatttatcttttgagactggcttatttcacttaggataaggtcttcacggttcacccatgttgtataatgtgtcagaatatccttcctttttaggtgaaataatattctatggtatttatataccacatttatttatccattcatctgttagtggatacttgggctacttccaccttttgcctattgaaataatgctgctatgaagatgagtgt

SEQ ID NO: 10495 - protein, 537 aa, Homo sapiens
MYSSFPIWQGRVVFEDVAIYFSQEEWGHLDEAQRLLYRDVMLENLALLSSLGSWHGAEDEEAPSQQGFSVGVSEVTASKPCLSSQKVHPSETCGPPLKDILCLVEHNGIHPEQHIYICEAELFQHPKQQIGENLSRGDDWIPSFGKNHRVHMAEEIFTCMEGWKDLPATSCLLQHQGPQSEWKPYRDTEDREAFQTGQNDYKCSECGKTFTCSYSFVEHQKIHTGERSYECNKCGKFFKYSANFMKHQTVHTSERTYECRECGKSFMYNYRLMRHKRVHTGERPYECNTCGKFFRYSSTFVRHQRVHTGERPYECRECGKFFMDSSTLIKHQRVHTGERPYKCNDCGKFFRYISTLIRHQRIHTGERPYECSVCGELFRYNSSLVKHWRNHTGERPYKCSECGKSFRYHCRLIRHQRVHTGERPYECSECGKFFRYNSNLIKHWRNHTGERPYECRECGKAFSHKHILVEHQKIHSGERPYECSECQKAFIRKSHLVHHQKIHSEERLVCSMNVGNSLAKTPTSLNIRDFTMEKVYH

SEQ ID NO: 10496 - DNA, 1395 bp, Homo sapiens
gggacttcctgcaacgcctcctggggttgtcaatatggctgcgttgggatctgttcaccttcaggctgagtcgagactgaggtgaaaaagcggaaaaacgcgagaaaaggtttccccgttgtacagaggctagagtgaggctcggttgaatcggttgcaggcgttggtgcctctgtcagcgtccaggtcactgccgctcccgccccgctcttccctggctgtgctggcggaggctgcgccgatgaacctgactgaggttgttggcatggagccaaggatgaggaggcaccttccaagcaatgtgtttctgtaggagtgtcacaggtcacaactttaaagccagctttgtccacccagaaggcccagccctgtgagacatgtagctcacttctgaaggacattctacacctggctgagcatgacggaacacaccccaagcgtacagccaagctttacctgcaccaaaaggagcatcttagagagaagctcaccagaagtgatgaagggaggccttcgtttgtgaatgacagtgttcacctggcaaagaggaacctcacatgcatgcagggtggcaaggattttactggtgattcagatcttcaacaacaggctcttcacagtgggtggaagccacacagggacactcatggtgtggaggcctttcaaagtggacagaataattacagctgcacccaatgtgggaaagacttttgccaccaacatacactgtttgagcaccagaaaatccacacagaggaaaggccttatgagtgcagtgaatgtggcaaattgtttaggtacaactccgaccttattaaacatcagcgaaatcatactggagaaaggccttataagtgtagtgaatgtggaaaagccttcagcctcaaatacaatgttgttcaacaccagaaaattcacactggagaaaggccttatgagtgcagtgaatgtgggaaagcttttcttagaaagtctcacctacttcagcaccagaggattcacaccaggccaaggccttatgtgtgtagtgaatgtgggaaggccttccttacacaggctcaccttgttggtcaccagaaaattcatactggagaacggccttatggatgcaatgaatgtgggaaatactttatgtacagttcagcactcattagacatcagaaagttcacactggagaaaggcctttttattgctgtgaatgtgggaaattctttatggacagctgcacactcattattcaccagagagttcatactggagaaaaaccttatgaatgcaacgaatgtgggaaattctttagataccgttccacactcattagacatcagaaagttcacactggagaaaagccttatgagtgtagtgaatgtgggaagttctttatggacacttcc

SEQ ID NO: 10497 - protein, 289 aa, Homo sapiens
MTVFTWQRGTSHACRVARILLVIQIFNNRLFTVGGSHTGTLMVWRPFKVDRIITAAPNVGKTFATNIHCLSTRKSTQRKGLMSAVNVANCLGTTPTLLNISEIILEKGLISVVNVEKPSASNTMLFNTRKFTLEKGLMSAVNVGKLFLESLTYFSTRGFTPGQGLMCVVNVGRPSLHRLTLLVTRKFILENGLMDAMNVGNTLCTVQHSLDIRKFTLEKGLFIAVNVGNSLWTAAHSLFTREFILEKNLMNATNVGNSLDTVPHSLDIRKFTLEKSLMSVVNVGSSLWT

SEQ ID NO: 10498 - DNA, 2851 bp, Homo sapiens
gcaacgcctcctggggttgtcaatatggctgcgttgggatctgttcaccttcaggctgagtcgagactgaggtgaaaaagcggaaaaacgcgagaaaaggtttccccgttgtacagaggctagagtgaggctcggttgaatcggttgcaggcgttggtgcctctgtcagcgtccaggtcactgccgctcccgccccgctcttccctggctgtgctggcggaggctgcgccgatgaacctgactgagggttcatagcagtggcagcaatgcttatggatgctggacaggattatatggtttttgaggacgtggccatacatttctcccaggaggagtggggaattcttaatgacgttcagagacacctgcacagcgatgtgatgctggagaactttgcacttttgtcctcagtaggttgttggcatggagccaaggatgaggaggcaccttccaagcaatgtgtttctgtaggagtgtcacaggtcacaactttaaagccagctttgtccacccagaaggcccagccctgtgagacatgtagctcacttctgaaggacattctacacctggctgagcatgacggaacacaccccaagcgtacagccaagctttacctgcaccaaaaggagcatcttagagagaagctcaccagaagtgatgaagggaggccttcgtttgtgaatgacagtgttcacctggcaaagaggaacctcacatgcatgcagggtggcaaggattttactggtgattcagatcttcaacaacaggctcttcacagtgggtggaagccacacagggacactcatggtgtggaggcctttcaaagtggacagaataattacagctgcacccaatgtgggaaagacttttgccaccaacatacactgtttgagcaccagaaaatccacacagaggaaaggccttatgagtgcagtgaatgtggcaaattgtttaggtacaactccgaccttattaaacatcagcgaaatcatactggagaaaggccttataagtgtagtgaatgtggaaaagccttcagcctcaaatacaatgttgttcaacaccagaaaattcacactggagaaaggccttatgagtgcagtgaatgtgggaaagcttttcttagaaagtctcacctacttcagcaccagaggattcacaccaggccaaggccttatgtgtgtagtgaatgtgggaaggccttccttacacaggctcaccttgttggtcaccagaaaattcatactggagaacggccttatggatgcaatgaatgtgggaaatactttatgtacagttcagcactcattagacatcagaaagttcacactggagaaaggcctttttattgctgtgaatgtgggaaattctttatggacagctgcacactcattattcaccagagagttcatactggagaaaaaccttatgaatgcaacgaatgtgggaaattctttagataccgttccacactcattagacatcagaaagttcacactggagaaaagccttatgagtgtagtgaatgtgggaagttctttatggacacttccacactcattattcatcagagagttcatactggagaaaagccttatgaatgcaacaaatgtgggaaattctttaggtattgcttcacactgaatagacatcagagagttcactctggagagaggccttatgaatgcagtgaatgtggcaaattctttgtggacagctgtacactgaagagtcatcagagagttcacactggagaaagaccttttgaatgcagcatttgtgggaaatcctttagatgtcgctccacacttgatacacatcagagaattcacactggtgaaaggccttatgagtgtagtgaatgtgggaaattctttaggcacaactcaaatcatattagacatcggagaaatcactttggagaaaggtcttttgagtgcactgagtgtgggagagtttttagccaaaattcccacctcattcggcaccaaaaagttcacactagggaaagaacttacaaatgcagcaaatgtgggaaattttttatggacagctccacactcattagtcatgagagagttcatactggagaaaagccttatgagtgcagtgaatgtgggaaagtctttagatacaactccagcctcattaaacatcggagaattcacactggagagagaccttatcagtgcagtgaatgtggaagagtctttaaccaaaattctcatctcattcagcaccagaaagttcacaccagataaagaatgtatatataaagcagatggggaaagacttcacacagaaatctactctgatttagcactgggacctacgttttaaaaaaagtattcttgtagaatacagataacataaaatctaacatcttaaccatgttaaagtgtatagttcagtactgttaagtcattcacattgtgcaatgaatatctagaagtcttttcaacttatgaaactaagtctataccttttaaaaccttattcctcactccatccagcctcttgacaagcaccgctctgtatgaattttactagtccgggtacctcatataagaaaacttaagttttggtcttcttgtggtttattttgtggcttattttgcttaacgttatatttttaaggtttcatgttctaatccattagaatttccatcctttttaaaggctgaataaaattctgttagtcatgtgttgcttaacagtggggaagtgtcctgagaaaagtgttattaggtgattttctttctttttttggtggtgggggggttgcgtgaatgcctaggctgtatggtatatcctatagcaccttgctacaaacttgtatagcatattactg

SEQ ID NO: 10499 - protein, 664 aa, Homo sapiens
MLMDAGQDYMVFEDVAIHFSQEEWGILNDVQRHLHSDVMLENFALLSSVGCWHGAKDEEAPSKQCVSVGVSQVTTLKPALSTQKAQPCETCSSLLKDILHLAEHDGTHPKRTAKLYLHQKEHLREKLTRSDEGRPSFVNDSVHLAKRNLTCMQGGKDFTGDSDLQQQALHSGWKPHRDTHGVEAFQSGQNNYSCTQCGKDFCHQHTLFEHQKIHTEERPYECSECGKLFRYNSDLIKHQRNHTGERPYKCSECGKAFSLKYNVVQHQKIHTGERPYECSECGKAFLRKSHLLQHQRIHTRPRPYVCSECGKAFLTQAHLVGHQKIHTGERPYGCNECGKYFMYSSALIRHQKVHTGERPFYCCECGKFFMDSCTLIIHQRVHTGEKPYECNECGKFFRYRSTLIRHQKVHTGEKPYECSECGKFFMDTSTLIIHQRVHTGEKPYECNKCGKFFRYCFTLNRHQRVHSGERPYECSECGKFFVDSCTLKSHQRVHTGERPFECSICGKSFRCRSTLDTHQRIHTGERPYECSECGKFFRHNSNHIRHRRNHFGERSFECTECGRVFSQNSHLIRHQKVHTRERTYKCSKCGKFFMDSSTLISHERVHTGEKPYECSECGKVFRYNSSLIKHRRIHTGERPYQCSECGRVFNQNSHLIQHQKVHTR

SEQ ID NO: 10500 - DNA, 2808 bp, Homo sapiens
aacgcctcctggggttgtcaatatggctgcgttgggatctgttcaccttcaggctgagtcgagactgaggtgaaaaagcggaaaaacgcgagaaaaggtttccccgttgtacagaggctagagtgaggctcggttgaatcggttgcaggcgttggtgcctctgtcagcgtccaggtcactgccgctcccgccccgctcttccctggctgtgctggcggaggctgcgccgatgaacctgactgaggattatatggtttttgaggacgtggccatacatttctcccaggaggagtggggaattcttaatgacgttcagagacacctgcacagcgatgtgatgctggagaactttgcacttttgtcctcagtaggttgttggcatggagccaaggatgaggaggcaccttccaagcaatgtgtttctgtaggagtgtcacaggtcacaactttaaagccagctttgtccacccagaaggcccagccctgtgagacatgtagctcacttctgaaggacattctacacctggctgagcatgacggaacacaccccaagcgtacagccaagctttacctgcaccaaaaggagcatcttagagagaagctcaccagaagtgatgaagggaggccttcgtttgtgaatgacagtgttcacctggcaaagaggaacctcacatgcatgcagggtggcaaggattttactggtgattcagatcttcaacaacaggctcttcacagtgggtggaagccacacagggacactcatggtgtggaggcctttcaaagtggacagaataattacagctgcacccaatgtgggaaagacttttgccaccaacatacactgtttgagcaccagaaaatccacacagaggaaaggccttatgagtgcagtgaatgtggcaaattgtttaggtacaactccgaccttattaaacatcagcgaaatcatactggagaaaggccttataagtgtagtgaatgtggaaaagccttcagcctcaaatacaatgttgttcaacaccagaaaattcacactggagaaaggccttatgagtgcagtgaatgtgggaaagcttttcttagaaagtctcacctacttcagcaccagaggattcacaccaggccaaggccttatgtgtgtagtgaatgtgggaaggccttccttacacaggctcaccttgttggtcaccagaaaattcatactggagaacggccttatggatgcaatgaatgtgggaaatactttatgtacagttcagcactcattagacatcagaaagttcacactggagaaaggcctttttattgctgtgaatgtgggaaattctttatggacagctgcacactcattattcaccagagagttcatactggagaaaaaccttatgaatgcaacgaatgtgggaaattctttagataccgttccacactcattagacatcagaaagttcacactggagaaaagccttatgagtgtagtgaatgtgggaagttctttatggacacttccacactcattattcatcagagagttcatactggagaaaagccttatgaatgcaacaaatgtgggaaattctttaggtattgcttcacactgaatagacatcagagagttcactctggagagaggccttatgaatgcagtgaatgtggcaaattctttgtggacagctgtacactgaagagtcatcagagagttcacactggagaaagaccttttgaatgcagcatttgtgggaaatcctttagatgtcgctccacacttgatacacatcagagaattcacactggtgaaaggccttatgagtgtagtgaatgtgggaaattctttaggcacaactcaaatcatattagacatcggagaaatcactttggagaaaggtcttttgagtgcactgagtgtgggagagtttttagccaaaattcccacctcattcggcaccaaaaagttcacactagggaaagaacttacaaatgcagcaaatgtgggaaattttttatggacagctccacactcattagtcatgagagagttcatactggagaaaagccttatgagtgcagtgaatgtgggaaagtctttagatacaactccagcctcattaaacatcggagaattcacactggagagagaccttatcagtgcagtgaatgtggaagagtctttaaccaaaattctcatctcattcagcaccagaaagttcacaccagataaagaatgtatatataaagcagatggggaaagacttcacacagaaatctactctgatttagcactgggacctacgttttaaaaaaagtattcttgtagaatacagataacataaaatctaacatcttaaccatgttaaagtgtatagttcagtactgttaagtcattcacattgtgcaatgaatatctagaagtcttttcaacttatgaaactaagtctataccttttaaaaccttattcctcactccatccagcctcttgacaagcaccgctctgtatgaattttactagtccgggtacctcatataagaaaacttaagttttggtcttcttgtggtttattttgtggcttattttgcttaacgttatatttttaaggtttcatgttctaatccattagaatttccatcctttttaaaggctgaataaaattctgttagtcatgtgttgcttaacagtggggaagtgtcctgagaaaagtgttattaggtgattttctttctttttttggtggtgggggggttgcgtgaatgcctaggctgtatggtatatcctatagcaccttgctacaaacttgtatagcatattactg

SEQ ID NO: 10501 - protein, 662 aa, Homo sapiens; identical to SEQ ID NO: 1621

SEQ ID NO: 10502 - DNA, 1416 bp, Homo sapiens
ctggggttgtcaatatggctgcgttgggatctgttcaccttcaggctgagtcgagactgaggtgaaaaagcggaaaaacgcgagaaaaggtttccccgttgtacagaggctagagtgaggctcggttgaatcggttgcaggcgttggtgcctctgtcagcgtccaggtcactgccgctcccgccccgctcttccctggctgtgctggcggaggctgcgccgatgaacctgactgagggttcatagcagtggcagcaatgcttatggatgctggacaggttgttggcatggagccaaggatgaggaggcaccttccaagcaatgtgtttctgtaggagtgtcacaggtcacaactttaaagccagctttgtccacccagaaggcccagccctgtgagacatgtagctcacttctgaaggacattctacacctggctgagcatgacggaacacaccccaagcgtacagccaagctttacctgcaccaaaaggagcatcttagagagaagctcaccagaagtgatgaagggaggccttcgtttgtgaatgacagtgttcacctggcaaagaggaacctcacatgcatgcagggtggcaaggattttactggtgattcagatcttcaacaacaggctcttcacagtgggtggaagccacacagggacactcatggtgtggaggcctttcaaagtggacagaataattacagctgcacccaatgtgggaaagacttttgccaccaacatacactgtttgagcaccagaaaatccacacagaggaaaggccttatgagtgcagtgaatgtggcaaattgtttaggtacaactccgaccttattaaacatcagcgaaatcatactggagaaaggccttataagtgtagtgaatgtggaaaagccttcagcctcaaatacaatgttgttcaacaccagaaaattcacactggagaaaggccttatgagtgcagtgaatgtgggaaagcttttcttagaaagtctcacctacttcagcaccagaggattcacaccaggccaaggccttatgtgtgtagtgaatgtgggaaggccttccttacacaggctcaccttgttggtcaccagaaaattcatactggagaacggccttatggatgcaatgaatgtgggaaatactttatgtacagttcagcactcattagacatcagaaagttcacactggagaaaggcctttttattgctgtgaatgtgggaaattctttatggacagctgcacactcattattcaccagagagttcatactggagaaaaaccttatgaatgcaacgaatgtgggaaattctttagataccgttccacactcattagacatcagaaagttcacactggagaaaagccttatgagtgtagtgaatgtgggaagttctttatggacacttcc

SEQ ID NO: 10503 - protein, 289 aa, Homo sapiens; identical to SEQ ID NO: 10497

SEQ ID NO: 10504 - DNA, 393 bp, Homo sapiens
ccatataagccctattagttggcaatccttttaatctctattttacacataagggcaccgagacttaaggaagttcagtcctcatcaagacactgaaccctgaggacttactgtgtaccctcagataactttgctctagttgcagggccagaggtggttgtacagtcagcctgtaggatgctgcaatgctgtcttaatcctcatggcctgcctcttcccacagggttcatagcagtggcagcaatgcttatggatgctggacaggattatatggtttttgaggacgtggccatacatttctcccaggaggagtggggaattcttaatgacgttcagagacacctgcacagcgatgtgatgctggagaactttgcacttttgtcctcagtaggt

SEQ ID NO: 10505 - protein, 71 aa, Homo sapiens
MLQCCLNPHGLPLPTGFIAVAAMLMDAGQDYMVFEDVAIHFSQEEWGILNDVQRHLHSDVMLENFALLSSV

SEQ ID NO: 10506 - DNA, 5683 bp, Homo sapiens
gatgaggaggcaccttccaagcaatgtgtttctgtaggagtgtcacaggtcacaactttaaagccagctttgtccacccagaaggcccagccctgtgagacatgtagctcacttctgaaggacattctacacctggctgagcatgacggaacacaccccaagcgtacagccaagctttacctgcaccaaaaggagcatcttagagagaagctcaccagaagtgatgaagggaggccttcgtttgtgaatgacagtgttcacctggcaaagaggaacctcacatgcatgcagggtggcaaggattttactggtgattcagatcttcaacaacaggctcttcacagtgggtggaagccacacagggacactcatggtgtggaggcctttcaaagtggacagaataattacagctgcacccaatgtgggaaagacttttgccaccaacatacactgtttgagcaccagaaaatccacacagaggaaaggccttatgagtgcagtgaatgtggcaaattgtttaggtacaactccgaccttattaaacatcagcgaaatcatactggagaaaggccttataagtgtagtgaatgtggaaaagccttcagcctcaaatacaatgttgttcaacaccagaaaattcacactggagaaaggccttatgagtgcagtgaatgtgggaaagcttttcttagaaagtctcacctacttcagcaccagaggattcacaccaggccaaggccttatgtgtgtagtgaatgtgggaaggccttccttacacaggctcaccttgttggtcaccagaaaattcatactggagaacggccttatggatgcaatgaatgtgggaaatactttatgtacagttcagcactcattagacatcagaaagttcacactggagaaaggcctttttattgctgtgaatgtgggaaattctttatggacagctgcacactcattattcaccagagagttcatactggagaaaaaccttatgaatgcaacgaatgtgggaaattctttagataccgttccacactcattagacatcagaaagttcacactggagaaaagccttatgagtgtagtgaatgtgggaagttctttatggacacttccacactcattattcatcagagagttcatactggagaaaagccttatgaatgcaacaaatgtgggaaattctttaggtattgcttcacactgaatagacatcagagagttcactctggagagaggccttatgaatgcagtgaatgtggcaaattctttgtggacagctgtacactgaagagtcatcagagagttcacactggagaaagaccttttgaatgcagcatttgtgggaaatcctttagatgtcgctccacacttgatacacatcagagaattcacactggtgaaaggccttatgagtgtagtgaatgtgggaaattctttaggcacaactcaaatcatattagacatcggagaaatcactttggagaaaggtcttttgagtgcactgagtgtgggagagtttttagccaaaattcccacctcattcggcaccaaaaagttcacactagggaaagaacttacaaatgcagcaaatgtgggaaattttttatggacagctccacactcattagtcatgagagagttcatactggagaaaagccttatgagtgcagtgaatgtgggaaagtctttagatacaactccagcctcattaaacatcggagaattcacactggagagagaccttatcagtgcagtgaatgtggaagagtctttaaccaaaattctcatctcattcagcaccagaaagttcacaccagataaagaatgtatatataaagcagatggggaaagacttcacacagaaatctactctgatttagcactgggacctacgttttaaaaaaagtattcttgtagaatacagataacataaaatctaacatcttaaccatgttaaagtgtatagttcagtactgttaagtcattcacattgtgcaatgaatatctagaagtcttttcaacttatgaaactaagtctataccttttaaaaccttattcctcactccatccagcctcttgacaagcaccgctctgtatgaattttactagtccgggtacctcatataagaaaacttaagttttggtcttcttgtggtttattttgtggcttattttgcttaacgttatatttttaaggtttcatgttctaatccattagaatttccatcctttttaaaggctgaataaaattctgttagtcatgtgttgcttaacagtggggaagtgtcctgagaaaagtgttattaggtgattttctttctttttttggtggtgggggggttgcgtgaatgcctaggctgtatggtatatcctatagcaccttgctacaaacttgtatagcatattactgtactgaatactgtaggctgttggaacacatggtaagtaattgtttttaagtatatctaaacagaaaaggtacagtaaaaatacagtataaaagaaaaaatgatagactcacagagaacttaccatgaatgaagcttacagtactgcaagttgctctaggtgagtcagtgagtggtaagtgaatgtgaaggcctaggttgttactgtgctgtagactttatagacattgtgtacttagacgacaatacatttttatttttattattatttttgagacagaatcttgctctgttgcccagactagagtgcagtggtgcaatcttggcttcctgcaacctcctccacctcctggttcaagcagttctgcctcagcttcccaagtgtctgggattacaggcatgcaccaccatgccccgctaatttttgtatttttagtagagaacggggtcttaccatgttggccaggctggtctcaaactcccgacctcaagtgagccactcgctttggcctcccaaagtgctgggattacaggcatgagccaccgcacccggccggttttaccatttttagagccaagctttactatatatttgatatttgttctttcttcaaccttagctgaattcacattcctctgatagaaggtgttttcaaactgatgccgttcttagtgcctcaaactagatcctgttcatacttgttagaacaagttattacaaattcactttggtgtaaaaaattgaaatccatacataatttttttttttttttttgacagagtctcactaacgctaggttggagtgcagtggcatgatctcggctcattgcaacctccgcctcctgggttcaagcaattctcctgcctcagcctcttgagtagctgggattacaggtgcccacaatcacgcccagctaatttttgtatttttagtagagatgggttttcactctgttggccaggctgctctcgaactcctgacctcaggtgatccacctgcctgggcctcacaaagtgctgtgattacaggcttaagccaccacccctggccaattttttcataatatacatttttttctcatttttcatgaaacttttgaagacccctcatattctagatattccttctcagatatgtggttttcaaatactttctcccattgagtctttttccttttcactctgtccattatgtccttttttacacaggaattttgaatttaaatggagtctaatatatctgttttataagtctttgatgcatttgagttcattttagcaacttaattcttttgcgtgtggatatccagttttttttttttaacatcaaaagaataatgtttttgcctagcattaaggcccttggtagaggcttgtcagttacaattttggagcagcagattaagtccacactcccaaccattttccttatcaggctctcaaactctgggccacaatatgtaagacccaatcaccccaggatcaggaatcagatatctagggacagcttctgtgcccaggagcttgtaaaattattccattggtcaatgcacaggggtccctgaaaacctagctaaccccaatttacatggcacacacaagctgccccctaagctccagcttgctgttatcttgggttccctcataactcttgcagccctgcctatgtccttaggtttcaagctgtaagtagcaaagtggtctacattttatgattatcattgtgacatgtcctgacatcagaaaaacacctttgtatgttattactatacaaccagcagaatattatgagtgcagcaaatgttagaaagtattcagcctaacttcactgagcaagagtaagttcatcctggagaaagtccttaggaatgcaggcaatatactttttttcctttgtcaacaggtcaaaaacagcaaagctctatcgagcttgtcttactcaccctatttttttgttgctctgttttgttttaggcttttagcctgaagccatggttttgtttctgtctctagtggtaggtggacaagaggaatgagatgagaaaggagctttactggcccagctagaaacaaactaagaacccatgactgtattctttcccttggatgaccctgtgttagcttgttgagggagatctcagcctgaaattgaatctcacatccaaacatccacgcaagggagatttgttgtaattgtcagatatatggtaaatttttgtgaatgatgttgcactttctgaccctgcctggggcctttccagagttaagttgctgaaagtgtgcattacagaagactcctgctattagctgtcatggtgccacaatgtgcatcaccttagtcaccttaaattacttagagagtgataaggtctggacttctggttaaatgtttttaaaaaatggggggtgggggggtggtgcatagattgctgtgttctctacctttatctggaatattcagtcatttgttccctttgggggcctcattcccagtcccctgactggtttgggtgtggacatcacccagctttggacagagaacacacgccaacttcagctggcagcttgtagagatttccttttttcagaggtattattagttgtctgatactgataatgttgatgataaattttctaccttccaagcttcccaacccagtcaatttccacctaagcattgctgttttcttctgatgataaaggtcatattgtttaagctacatttactcttggggttctcttcactgtgtgctgcgggttgagaacaaaattaggctttgccagaatgaaaaagtgaatggtttttggggccttcaactttttgtgctcttgaagaaataagaagacaaaatagctttcaatccacatcaggcccaatttgcattgcttcgggagttcctgggaaagtgacggacttctatccaaaatcgcgccgtgaatttgattattggtagttctacagtcagcttgagggttgttggtttgacagttgtcagagcatgttgcagctgtatgaggtgggtatctgtacatatggatgtcccatattctccagcattgcataggaatagctggtgtctagatcctgcctcaggagctatgtgtcctgaatttaaaaatcaggtatgttatatccctggggcatgtcagacatacaacaacagtgcattagtccattttccattgcttacaacaaaataccttaaactgggtaatttgtaaagaaaataaatttcttactgttgttttgttgtgctttcttttttt

SEQ ID NO: 10507 - protein, 34 aa, Homo sapiens [sequence omitted]

SEQ ID NO: 10508 - DNA, 1925 bp, Homo sapiens
acttctggcggcgccctcatggttgcgttagcatggctacctagggatctgttcactgatttagagggtcccagagctctgggtcgggactgaggtgaaagagcggaaaaacgcgagaagcggtgttccttctacacagaggctagagtgcggatcggctgagtcggctgcaggcgcccctgcctccgtcagcgtccaggtgaccgccgttcccgccccgctcttccctgggtggactggaggaggccgcgccgatgaacctgaccgaggtgcgtgcagcgtcccaggccgccccgcccaacccctcctcccagtgctgaagtcccaaggagccgccctgcaggttgttggcatggagccaaggatgaggaggtaccttccaagcagtgtgtttctgtaagagtgttacaggtcacaattccaaagccagctttgtccaccctgaaggcccagccctgcaagatgtgtagctcaattctgaaggacattctgcacctggctgagcacgatggaacacaccctgagcaagggctgtacacatgtgcagcagagcatgacctgcaccaaaaggagcagattagagagaagctcaccagaagtgatgagtggaggccttcatttgtgaaccacagtgctcacgtgggagagaggaacttcacatgcacgcagggtggcaaggattttactgccagctcagaccttctccagcaacaggtcttaaacagtgggtggaagctgtacagggatacccaggatggggaagcctttcaaggtgaacagaatgatttcaactccagccaaggtgggaaagacttttgccaccaacatgggctgtttgagcaccaaaaaacccataatggggagaggccttatgagttcagtgaatgtggggaattgtttaggtacaactccaaccttattaaatatcagcaaaatcatgctggagaaaggccttatgagggcactgaatatggaaagacctttattagaaagtccaacctagttcagcaccagaaaattcacagtgaaggctttctttcaaaaaggtctgaccccattgaacatcaggagattctcagtagaccaacaccttatgaatgcacccagtgtgggaaggcctttcttacacaggctcatctggttggtcaccagaaaacccatactggagaacagccctatgaatgcaacaagtgtgggaagttttttatgtataactccaaactcatcagacatcagaaagttcacactggggagaggcgttacgagtgcagtgaatgtgggaaattgtttatggacagcttcacactcggtagacatcagagagttcatactggagaaaggccttttgaatgcagcatatgtggaaaattctttagtcaccgctccacactcaatatgcaccagagagttcatgctggcaaaaggctttataagtgtagcgaatgtgggaaagcctttagcctcaaacataatgttgttcagcatctgaaaattcatactggagaacggccttatgagtgcactgaatgtgagaaggcctttgttagaaagtcccacctagttcagcaccagaaaatccacactgatgcattttcaaaaaggtctgacctcattcaacacaagaggattgacattaggccaaggccttatacatgcagtgaatgtgggaaggccttccttacacaggctcatctggttggtcaccagaaaatccatactggagaacggccttatgaatgcactcaatgtgcgaaggcctttgttagaaagtcccacctagttcagcatgagaaaatccacactgatgcattttcaaaaaggtctgacctcattcaacacaagaggattgacctcaggccaaggccttatgtgtgtagtgaatgtgggaaggccttccttacacaggctcatctagatggtcacca

SEQ ID NO: 10509 - protein, 486 aa, Homo sapiens
MCSSILKDILHLAEHDGTHPEQGLYTCAAEHDLHQKEQIREKLTRSDEWRPSFVNHSAHVGERNFTCTQGGKDFTASSDLLQQQVLNSGWKLYRDTQDGEAFQGEQNDFNSSQGGKDFCHQHGLFEHQKTHNGERPYEFSECGELFRYNSNLIKYQQNHAGERPYEGTEYGKTFIRKSNLVQHQKIHSEGFLSKRSDPIEHQEILSRPTPYECTQCGKAFLTQAHLVGHQKTHTGEQPYECNKCGKFFMYNSKLIRHQKVHTGERRYECSECGKLFMDSFTLGRHQRVHTGERPFECSICGKFFSHRSTLNMHQRVHAGKRLYKCSECGKAFSLKHNVVQHLKIHTGERPYECTECEKAFVRKSHLVQHQKIHTDAFSKRSDLIQHKRIDIRPRPYTCSECGKAFLTQAHLVGHQKIHTGERPYECTQCAKAFVRKSHLVQHEKIHTDAFSKRSDLIQHKRIDLRPRPYVCSECGKAFLTQAHLDG

SEQ ID NO: 10510 - DNA, 3031 bp, Homo sapiens
ctggcggcgccctcatggttgcgttagcatggctacctagggatctgttcactgatttagagggtcccagagctctgggtcgggactgaggtgaaagagcggaaaaacgcgagaagcggtgttccttctacacagaggctagagtgcggatcggctgagtcggctgcaggcgcccctgcctccgtcagcgtccaggtgaccgccgttcccgccccgctcttccctgggtggactggaggaggccgcgccgatgaacctgaccgaggattgtatggtctttgaggatgtggccatatatttctcccaagaggaatgggggatccttaatgatgctcagagacacctgcacagcaatgtgatgttggagaactttgcgcttttgtcatcagtaggttgttggcatggagccaaggatgaggaggtaccttccaagcagtgtgtttctgtaagagtgttacaggtcacaattccaaagccagctttgtccaccctgaaggcccagccctgcaagatgtgtagctcaattctgaaggacattctgcacctggctgagcacgatggaacacaccctgagcaagggctgtacacatgtgcagcagagcatgacctgcaccaaaaggagcagattagagagaagctcaccagaagtgatgagtggaggccttcatttgtgaaccacagtgctcacgtgggagagaggaacttcacatgcacgcagggtggcaaggattttactgccagctcagaccttctccagcaacaggtcttaaacagtgggtggaagctgtacagggatacccaggatggggaagcctttcaaggtgaacagaatgatttcaactccagccaaggtgggaaagacttttgccaccaacatgggctgtttgagcaccaaaaaacccataatggggagaggccttatgagttcagtgaatgtggggaattgtttaggtacaactccaaccttattaaatatcagcaaaatcatgctggagaaaggccttatgagggcactgaatatggaaagacctttattagaaagtccaacctagttcagcaccagaaaattcacagtgaaggctttctttcaaaaaggtctgaccccattgaacatcaggagattctcagtagaccaacaccttatgaatgcacccagtgtgggaaggcctttcttacacaggctcatctggttggtcaccagaaaacccatactggagaacagccctatgaatgcaacaagtgtgggaagttttttatgtataactccaaactcatcagacatcagaaagttcacactggggagaggcgttacgagtgcagtgaatgtgggaaattgtttatggacagcttcacactcggtagacatcagagagttcatactggagaaaggccttttgaatgcagcatatgtggaaaattctttagtcaccgctccacactcaatatgcaccagagagttcatgctggcaaaaggctttataagtgtagcgaatgtgggaaagcctttagcctcaaacataatgttgttcagcatctgaaaattcatactggagaacggccttatgagtgcactgaatgtgagaaggcctttgttagaaagtcccacctagttcagcaccagaaaatccacactgatgcattttcaaaaaggtctgacctcattcaacacaagaggattgacattaggccaaggccttatacatgcagtgaatgtgggaaggccttccttacacaggctcatctggttggtcaccagaaaatccatactggagaacggccttatgaatgcactcaatgtgcgaaggcctttgttagaaagtcccacctagttcagcatgagaaaatccacactgatgcattttcaaaaaggtctgacctcattcaacacaagaggattgacctcaggccaaggccttatgtgtgtagtgaatgtgggaaggccttccttacacaggctcatctagatggtcaccagaaaatccagactggagaacggcgttatgaatgcaatgaatgtgggaaattctttttggacagctacaaacttgttattcatcagagaattcacactggagaaaagccttataaatgcagcaaatgtgggaaattctttagatatcgctgtacactgagtagacatcagaaagttcacactggagaaagaccttatgagtgtagtgaatgtgggaaattttttagagatagctacaaactcattattcatcagagagttcatactggagaaaagccttatgaatgcagcaactgtgggaagtttcttagataccgctctacattcattaaacatcataaagtttgcactggggagaagcctcatgagtgcagtaaatgtagggaattgtttaggactaaatcgagccttattatacatcagcagtctcacactggagaaagtccttttaagttaagggaatgtgggaaagacttcaacaaatgtaatactggtcagcgccaaaaaactcacactggagaaaggtcttatgagtgtggtgaatccagcaaagtgtttaaatacaactccagcctcattaaacatcagataattcatactggaaaaaggccttagtggagtgaatgcaggaaagtcaccaaaactgtcacctcattcagcaccaaaaggttcacatcggaccaagaacctattaatatatgtaaatctaatgttgaaagagttcagatggaaatctgcgaggatttcctgctgggaactacattaaaaacatttatgtccaggcgtggtggctcacgcctgtaatcccagcactttgggaggcagaggtgggtggatcacctgaggtcaggagtttgagaccagccgggccaacatggtgaagccccatctctactaaaaatacaaaaattagctgggcatggtggcaggtgcctgtaatcccagctattcaggggactgaggcagggagcatcacttgaacctgggaggcggaggttgcagtgaactgagattgttccattgcactccagcctgggtgacagggcgagactctgtctc

SEQ ID NO: 10511 - protein, 778 aa, Homo sapiens; identical to SEQ ID NO: 1623

SEQ ID NO: 10512 - DNA, 613 bp, Homo sapiens
gccctcatggttgcgttagcatggctacctagggatctgttcactgatttagagggtcccagagctctgggtcgggactgaggtgaaagagcggaaaaacgcgagaagcggtgttccttctacacagaggctagagtgcggatcggctgagtcggctgcaggcgcccctgcctccgtcagcgtccaggtgaccgccgttcccgccccgctcttccctgggtggactggaggaggccgcgccgatgaacctgaccgaggccgaaagaatgagggtcgtgatcaactcagtatgccactggaggctatatgagtaaacagcaaactgtttctcatgaaagcaggatgttggcaaactgacaaactgcgtctgccacccagaaggaatgctgaaggcagtcacgacccaggcacaagtgtttcttgtgattaggcataattgaagcctgttaacaataatgtgaacttgtgatcaattaagcagctgaccagtcgttacctcctcctccctttcatcctacccaataaatgtggagggctgtggaagctcaggggctgcctttgctcactagaagcagggagctctcttcttccccagttcgccttctttaaaaca

SEQ ID NO: 10513 - protein, 32 aa, Homo sapiens
MKAGCWQTDKLRLPPRRNAEGSHDPGTSVSCD

SEQ ID NO: 10514 - DNA, 1833 bp, Homo sapiens
atggttgcgttagcatggctacctagggatctgttcactgatttagagggtcccagagctctgggtcgggactgaggtgaaagagcggaaaaacgcgagaagcggtgttccttctacacagaggctagagtgcggatcggctgagtcggctgcaggcgcccctgcctccgtcagcgtccaggtgaccgccgttcccgccccgctcttccctgggtggactggaggaggccgcgccgatgaacctgaccgaggttgttggcatggagccaaggatgaggaggtaccttccaagcagtgtgtttctgtaagagtgttacaggtcacaattccaaagccagctttgtccaccctgaaggcccagccctgcaagatgtgtagctcaattctgaaggacattctgcacctggctgagcacgatggaacacaccctgagcaagggctgtacacatgtgcagcagagcatgacctgcaccaaaaggagcagattagagagaagctcaccagaagtgatgagtggaggccttcatttgtgaaccacagtgctcacgtgggagagaggaacttcacatgcacgcagggtggcaaggattttactgccagctcagaccttctccagcaacaggtcttaaacagtgggtggaagctgtacagggatacccaggatggggaagcctttcaaggtgaacagaatgatttcaactccagccaaggtgggaaagacttttgccaccaacatgggctgtttgagcaccaaaaaacccataatggggagaggccttatgagttcagtgaatgtggggaattgtttaggtacaactccaaccttattaaatatcagcaaaatcatgctggagaaaggccttatgagggcactgaatatggaaagacctttattagaaagtccaacctagttcagcaccagaaaattcacagtgaaggctttctttcaaaaaggtctgaccccattgaacatcaggagattctcagtagaccaacaccttatgaatgcacccagtgtgggaaggcctttcttacacaggctcatctggttggtcaccagaaaacccatactggagaacagccctatgaatgcaacaagtgtgggaagttttttatgtataactccaaactcatcagacatcagaaagttcacactggggagaggcgttacgagtgcagtgaatgtgggaaattgtttatggacagcttcacactcggtagacatcagagagttcatactggagaaaggccttttgaatgcagcatatgtggaaaattctttagtcaccgctccacactcaatatgcaccagagagttcatgctggcaaaaggctttataagtgtagcgaatgtgggaaagcctttagcctcaaacataatgttgttcagcatctgaaaattcatactggagaacggccttatgagtgcactgaatgtgagaaggcctttgttagaaagtcccacctagttcagcaccagaaaatccacactgatgcattttcaaaaaggtctgacctcattcaacacaagaggattgacattaggccaaggccttatacatgcagtgaatgtgggaaggccttccttacacaggctcatctggttggtcaccagaaaatccatactggagaacggccttatgaatgcactcaatgtgcgaaggcctttgttagaaagtcccacctagttcagcatgagaaaatccacactgatgcattttcaaaaaggtctgacctcattcaacacaagaggattgacctcaggccaaggccttatgtgtgtagtgaatgtgggaaggccttccttacacaggctcatctagatggtcacca

SEQ ID NO: 10515 - protein, 486 aa, Homo sapiens; identical to SEQ ID NO: 10509

SEQ ID NO: 10516 - DNA, 678 bp, Homo sapiens
ggttgcgttagcatggctacctagggatctgttcactgatttagagggtcccagagctctgggtcgggactgaggtgaaagagcggaaaaacgcgagaagcggtgttccttctacacagaggctagagtgcggatcggctgagtcggctgcaggcgcccctgcctccgtcagcgtccaggtgaccgccgttcccgccccgctcttccctgggtggactggaggaggccgcgccgatgaacctgaccgaggtgcgtgcagcgtcccaggccgccccgcccaacccctcctcccagtgctgaagtcccaaggagccgccctgcaggccgaaagaatgagggtcgtgatcaactcagtatgccactggaggctatatgagtaaacagcaaactgtttctcatgaaagcaggatgttggcaaactgacaaactgcgtctgccacccagaaggaatgctgaaggcagtcacgacccaggcacaagtgtttcttgtgattaggcataattgaagcctgttaacaataatgtgaacttgtgatcaattaagcagctgaccagtcgttacctcctcctccctttcatcctacccaataaatgtggagggctgtggaagctcaggggctgcctttgctcactagaagcagggagctctcttcttccccagttcgccttctttaaaac

SEQ ID NO: 10517 - protein, 32 aa, Homo sapiens; identical to SEQ ID NO: 10513

SEQ ID NO: 10518 - DNA, 2018 bp, Homo sapiens
ggctacctagggatctgttcactgatttagagggtcccagagctctgggtcgggactgaggtgaaagagcggaaaaacgcgagaagcggtgttccttctacacagaggctagagtgcggatcggctgagtcggctgcaggcgcccctgcctccgtcagcgtccaggtgaccgccgttcccgccccgctcttccctgggtggactggaggaggccgcgccgatgaacctgaccgaggtgcgtgcagcgtcccaggccgccccgcccaacccctcctcccagtgctgaagtcccaaggagccgccctgcaggattgtatggtctttgaggatgtggccatatatttctcccaagaggaatgggggatccttaatgatgctcagagacacctgcacagcaatgtgatgttggagaactttgcgcttttgtcatcagtaggttgttggcatggagccaaggatgaggaggtaccttccaagcagtgtgtttctgtaagagtgttacaggtcacaattccaaagccagctttgtccaccctgaaggcccagccctgcaagatgtgtagctcaattctgaaggacattctgcacctggctgagcacgatggaacacaccctgagcaagggctgtacacatgtgcagcagagcatgacctgcaccaaaaggagcagattagagagaagctcaccagaagtgatgagtggaggccttcatttgtgaaccacagtgctcacgtgggagagaggaacttcacatgcacgcagggtggcaaggattttactgccagctcagaccttctccagcaacaggtcttaaacagtgggtggaagctgtacagggatacccaggatggggaagcctttcaaggtgaacagaatgatttcaactccagccaaggtgggaaagacttttgccaccaacatgggctgtttgagcaccaaaaaacccataatggggagaggccttatgagttcagtgaatgtggggaattgtttaggtacaactccaaccttattaaatatcagcaaaatcatgctggagaaaggccttatgagggcactgaatatggaaagacctttattagaaagtccaacctagttcagcaccagaaaattcacagtgaaggctttctttcaaaaaggtctgaccccattgaacatcaggagattctcagtagaccaacaccttatgaatgcacccagtgtgggaaggcctttcttacacaggctcatctggttggtcaccagaaaacccatactggagaacagccctatgaatgcaacaagtgtgggaagttttttatgtataactccaaactcatcagacatcagaaagttcacactggggagaggcgttacgagtgcagtgaatgtgggaaattgtttatggacagcttcacactcggtagacatcagagagttcatactggagaaaggccttttgaatgcagcatatgtggaaaattctttagtcaccgctccacactcaatatgcaccagagagttcatgctggcaaaaggctttataagtgtagcgaatgtgggaaagcctttagcctcaaacataatgttgttcagcatctgaaaattcatactggagaacggccttatgagtgcactgaatgtgagaaggcctttgttagaaagtcccacctagttcagcaccagaaaatccacactgatgcattttcaaaaaggtctgacctcattcaacacaagaggattgacattaggccaaggccttatacatgcagtgaatgtgggaaggccttccttacacaggctcatctggttggtcaccagaaaatccatactggagaacggccttatgaatgcactcaatgtgcgaaggcctttgttagaaagtcccacctagttcagcatgagaaaatccacactgatgcattttcaaaaaggtctgacctcattcaacacaagaggattgacctcaggccaaggccttatgtgtgtagtgaatgtgggaaggccttccttacacaggctcatctagatggtcacca

SEQ ID NO: 10519 - protein, 566 aa, Homo sapiens
MVFEDVAIYFSQEEWGILNDAQRHLHSNVMLENFALLSSVGCWHGAKDEEVPSKQCVSVRVLQVTIPKPALSTLKAQPCKMCSSILKDILHLAEHDGTHPEQGLYTCAAEHDLHQKEQIREKLTRSDEWRPSFVNHSAHVGERNFTCTQGGKDFTASSDLLQQQVLNSGWKLYRDTQDGEAFQGEQNDFNSSQGGKDFCHQHGLFEHQKTHNGERPYEFSECGELFRYNSNLIKYQQNHAGERPYEGTEYGKTFIRKSNLVQHQKIHSEGFLSKRSDPIEHQEILSRPTPYECTQCGKAFLTQAHLVGHQKTHTGEQPYECNKCGKFFMYNSKLIRHQKVHTGERRYECSECGKLFMDSFTLGRHQRVHTGERPFECSICGKFFSHRSTLNMHQRVHAGKRLYKCSECGKAFSLKHNVVQHLKIHTGERPYECTECEKAFVRKSHLVQHQKIHTDAFSKRSDLIQHKRIDIRPRPYTCSECGKAFLTQAHLVGHQKIHTGERPYECTQCAKAFVRKSHLVQHEKIHTDAFSKRSDLIQHKRIDLRPRPYVCSECGKAFLTQAHLDG

SEQ ID NO: 10520 - DNA, 454 bp, Homo sapiens
tgaaagagcggaaaaacgcgagaagcggtgttccttctacacagaggctagagtgcggatcggctgagtcggctgcaggcgcccctgcctccgtcagcgtccaggccgaaagaatgagggtcgtgatcaactcagtatgccactggaggctatatgagtaaacagcaaactgtttctcatgaaagcaggatgttggcaaactgacaaactgcgtctgccacccagaaggaatgctgaaggcagtcacgacccaggcacaagtgtttcttgtgattaggcataattgaagcctgttaacaataatgtgaacttgtgatcaattaagcagctgaccagtcgttacctcctcctccctttcatcctacccaataaatgtggagggctgtggaagctcaggggctgcctttgctcactagaagcagggagctctcttcttccccagttcgccttcttt

SEQ ID NO: 10521 - protein, 32 aa, Homo sapiens; identical to SEQ ID NO: 10513

SEQ ID NO: 10522 - DNA, 664 bp, Homo sapiens
gtttccagaacgcaatgtcagacctgaggtgacagaaaagggaaaacgtgagagagtgtcttcttccctgaagagaggtgggcctgaggcttgacagtggcgctgcctgagtgacctagccgctgggctgggccctggacagctgatcccaggttcctgcacttgtcgccacccttccgtagtccacaggcctgatggcggcggctgagccgatgggcccggcacaggttcccatgaactcagaagtaattgtggaccctatacaggggcaggtgaactttgaggacgtgttcgtgtacttctcccaggaggagtgggtgctccttgatgaggctcagaggctcctgtaccgtgatgtgatgctggagaactttgcacttatggcctctctggggatacctcagacaatggcagcttttggattgaaatatttgctgaatgacactggatacacaagcagcaagtccaacacaatcacagcaacagactctcctgcagaccttcccaggaagccagagccacacacaccatcatggtcctggaagaagcaagccatgagtatcaggacagtactgtggcatcctacaggctgagctgtacaaccatctctgccctgtactggagcaaagtaatctgaagctacagcaagtcctaagttcagtgc

SEQ ID NO: 10523 - protein, 132 aa, Homo sapiens
MAAAEPMGPAQVPMNSEVIVDPIQGQVNFEDVFVYFSQEEWVLLDEAQRLLYRDVMLENFALMASLGIPQTMAAFGLKYLLNDTGYTSSKSNTITATDSPADLPRKPEPHTPSWSWKKQAMSIRTVLWHPTG

SEQ ID NO: 10524 - DNA, 2520 bp, Homo sapiens
atgtgtagctcaattctgaaggacattctgcacctggctgagcacgatggaacacaccctgagcaagggctgtacacatgtgcagcagagcatgacctgcaccaaaaggagcagattagagagaagctcaccagaagtgatgagtggaggccttcatttgtgaaccacagtgctcacgtgggagagaggaacttcacatgcacgcagggtggcaaggattttactgccagctcagaccttctccagcaacaggtcttaaacagtgggtggaagctgtacagggatacccaggatggggaagcctttcaaggtgaacagaatgatttcaactccagccaaggtgggaaagacttttgccaccaacatgggctgtttgagcaccaaaaaacccataatggggagaggccttatgagttcagtgaatgtggggaattgtttaggtacaactccaaccttattaaatatcagcaaaatcatgctggagaaaggccttatgagggcactgaatatggaaagacctttattagaaagtccaacctagttcagcaccagaaaattcacagtgaaggctttctttcaaaaaggtctgaccccattgaacatcaggagattctcagtagaccaacaccttatgaatgcacccagtgtgggaaggcctttcttacacaggctcatctggttggtcaccagaaaacccatactggagaacagccctatgaatgcaacaagtgtgggaagttttttatgtataactccaaactcatcagacatcagaaagttcacactggggagaggcgttacgagtgcagtgaatgtgggaaattgtttatggacagcttcacactcggtagacatcagagagttcatactggagaaaggccttttgaatgcagcatatgtggaaaattctttagtcaccgctccacactcaatatgcaccagagagttcatgctggcaaaaggctttataagtgtagcgaatgtgggaaagcctttagcctcaaacataatgttgttcagcatctgaaaattcatactggagaacggccttatgagtgcactgaatgtgagaaggcctttgttagaaagtcccacctagttcagcaccagaaaatccacactgatgcattttcaaaaaggtctgacctcattcaacacaagaggattgacattaggccaaggccttatacatgcagtgaatgtgggaaggccttccttacacaggctcatctggttggtcaccagaaaatccatactggagaacggccttatgaatgcactcaatgtgcgaaggcctttgttagaaagtcccacctagttcagcatgagaaaatccacactgatgcattttcaaaaaggtctgacctcattcaacacaagaggattgacctcaggccaaggccttatgtgtgtagtgaatgtgggaaggccttccttacacaggctcatctagatggtcaccagaaaatccagactggagaacggcgttatgaatgcaatgaatgtgggaaattctttttggacagctacaaacttgttattcatcagagaattcacactggagaaaagccttataaatgcagcaaatgtgggaaattctttagatatcgctgtacactgagtagacatcagaaagttcacactggagaaagaccttatgagtgtagtgaatgtgggaaattttttagagatagctacaaactcattattcatcagagagttcatactggagaaaagccttatgaatgcagcaactgtgggaagtttcttagataccgctctacattcattaaacatcataaagtttgcactggggagaagcctcatgagtgcagtaaatgtagggaattgtttaggactaaatcgagccttattatacatcagcagtctcacactggagaaagtccttttaagttaagggaatgtgggaaagacttcaacaaatgtaatactggtcagcgccaaaaaactcacactggagaaaggtcttatgagtgtggtgaatccagcaaagtgtttaaatacaactccagcctcattaaacatcagataattcatactggaaaaaggccttagtggagtgaatgcaggaaagtcaccaaaactgtcacctcattcagcaccaaaaggttcacatcggaccaagaacctattaatatatgtaaatctaatgttgaaagagttcagatggaaatctgcgaggatttcctgctgggaactacattaaaaacatttatgtccaggcgtggtggctcacgcctgtaatcccagcactttgggaggcagaggtgggtggatcacctgaggtcaggagtttgagaccagccgggccaacatggtgaagccccatctctactaaaaatacaaaaattagctgggcatggtggcaggtgcctgtaatcccagctattcaggggactgaggcagggagcatcacttgaacctgggaggcggaggttgcagtgaactgagattgttccattgcactccagcctgggtgacagggcgagactctgtctc

SEQ ID NO: 10525 - protein, 691 aa, Homo sapiens
MCSSILKDILHLAEHDGTHPEQGLYTCAAEHDLHQKEQIREKLTRSDEWRPSFVNHSAHVGERNFTCTQGGKDFTASSDLLQQQVLNSGWKLYRDTQDGEAFQGEQNDFNSSQGGKDFCHQHGLFEHQKTHNGERPYEFSECGELFRYNSNLIKYQQNHAGERPYEGTEYGKTFIRKSNLVQHQKIHSEGFLSKRSDPIEHQEILSRPTPYECTQCGKAFLTQAHLVGHQKTHTGEQPYECNKCGKFFMYNSKLIRHQKVHTGERRYECSECGKLFMDSFTLGRHQRVHTGERPFECSICGKFFSHRSTLNMHQRVHAGKRLYKCSECGKAFSLKHNVVQHLKIHTGERPYECTECEKAFVRKSHLVQHQKIHTDAFSKRSDLIQHKRIDIRPRPYTCSECGKAFLTQAHLVGHQKIHTGERPYECTQCAKAFVRKSHLVQHEKIHTDAFSKRSDLIQHKRIDLRPRPYVCSECGKAFLTQAHLDGHQKIQTGERRYECNECGKFFLDSYKLVIHQRIHTGEKPYKCSKCGKFFRYRCTLSRHQKVHTGERPYECSECGKFFRDSYKLIIHQRVHTGEKPYECSNCGKFLRYRSTFIKHHKVCTGEKPHECSKCRELFRTKSSLIIHQQSHTGESPFKLRECGKDFNKCNTGQRQKTHTGERSYECGESSKVFKYNSSLIKHQIIHTGKRP

SEQ ID NO: 10526 - DNA, 722 bp, Homo sapiens
ggcaaccaggaactggtggctgcagccaccagccaagttctttccatcatcctgggccctcacctctggcataggctcttggtagtgggggcccagacagggaggcacctgccacctgcttcccttctcagccacccacagccctcatagggcagaatgggactcttgctgatgtagacgccgaagtcgcgggcgctcatggcgggcctggaggtactgttcgcatcggcagcgccggccatcacctgcaggcaggacgcgctcgtctgcttcttgcattgggaagtggtgacacacggttacttcggcttgggtgtcggtgaccagccgggtcccaatgataagaagtcagaactgctgccagctgggtggaacaacaataaagacctgtatgtcctccggtatgagtataaggatgggtccagaaagctccttgtgaaagccatcaccgtggagagcagcatgatcctcaatgtgctggaatatggctcacagcaagtggcagacttgaccctgaacttggatgattatatcgatgcagaacacctgggtgacttccacaggacctacaagaacagtgaggagcttcggtctcgtattgtgtctggaatcatcacacctatccatgagcagtgggaaaaggctaatgtaagcagtccccaccgggagttcccccctgctaccgccagagaggtggacccactccggattcctccacacca

SEQ ID NO: 10527 - protein, 173 aa, Homo sapiens
MAGLEVLFASAAPAITCRQDALVCFLHWEVVTHGYFGLGVGDQPGPNDKKSELLPAGWNNNKDLYVLRYEYKDGSRKLLVKAITVESSMILNVLEYGSQQVADLTLNLDDYIDAEHLGDFHRTYKNSEELRSRIVSGIITPIHEQWEKANVSSPHREFPPATAREVDPLRIPP

SEQ ID NO: 10528 - DNA, 3262 bp, Homo sapiens
ggcaaccaggaactggtggctgcagccaccagccaagttctttccatcatcctgggccctcacctctggcataggctcttggtagtgggggcccagacagggaggcacctgccacctgcttcccttctcagccacccacagccctcatagggcagaatgggactcttgctgatgtagacgccgaagtcgcgggcgctcatggcgggcctggaggtactgttcgcatcggcagcgccggccatcacctgcaggcaggacgcgctcgtctgcttcttgcattgggaagtggtgacacacggttacttcggcttgggtgtcggtgaccagccgggtcccaatgataagaagtcagaactgctgccagctgggtggaacaacaataaagacctgtatgtcctccggtatgagtataaggatgggtccagaaagctccttgtgaaagccatcaccgtggagagcagcatgatcctcaatgtgctggaatatggctcacagcaagtggcagacttgaccctgaacttggatgattatatcgatgcagaacacctgggtgacttccacaggacctacaagaacagtgaggagcttcggtctcgtattgtgtctggaatcatcacacctatccatgagcagtgggaaaaggctaatgtaagcagtccccaccgggagttcccccctgctaccgccagagaggtggacccactccggattcctccacaccacccacacaccagtcggcagcctccctggtgtgatcccctgggcccgtttgttgtcgggggagaagacttagacccttttgggcctcggagaggtggcatgattgtggatcccctgagatctggcttcccaagagcacttattgacccttcctcaggcctcccgaaccgacttcctccaggcgctgtgcccccaggagctcgctttgacccctttggacccattgggaccagcccacccggacctaacccagaccatctccccccgccgggctacgatgacatgtacctgtgaaggcctcaagaatgtaacatcccaggcttccctccattctcctggagctgccaccgctgtccccatcagcaaccatgttcttgcaggctgggggcaagggattctgctcatgtgtttgcagaccggctgggatagcctccccaccccttatcagagccaagacacctgctgcagctctccacctagctgcagatagctcccaaagagaaatcagtgtgtctctttcaccatcagctcctcccctttcaccaccagctcctctccacttcccaagggagactccggcaaccttcagcaacatatatcctcgaccagatgcagtgctataagaacagaacgcattttggatgttattattaagaaccaaatgtcaatacagaattcatgttgccggtttcccacttttctttttacattaatgcatagctgcttccatttatgagactttagagtttgagtttctgtagggctgaatgactctttttcctgcccagggcccattcttgcttctcaggcaccttccgtttattaattgccattgctcctgacatcactaagatgggtccccttctggctgcatgaatggaaatgagtgactggaaatcccataggccacaagaatgactttcacaagggcaggaacattgtggaaagactgcatcattctgatgaggcaaaatcctccagctattcctgtctgggccagttttgtaggtccatctgtgcatgggcagcagtagtcaaaaagccaaggaaaaaacagagcagacctgaaggctaatcttatttttgccactaacttagtgaatgaccctaagcaagttccttctcctcttagggccttgtgccaagcctatgaaattggaggtggctttcctgctctaaagcattttgatgtctcattctgtgtttggtaacccctataaactggggcagaggaaaagaatgatggttcaaggccatacttcccttgaaccttgtgtggttcttgcctaactctgtggtttttggaccccatggggcccagacagagcacaggagcatgggctgcctctgagtgtggtgttgaacttcgggaggagcagggagccctgcaccttgtgtcctggcccacctgacctttggtgttctccggatccttttcagcccgaggcctgacagacgcgggcagtgatgagccctgttctggagtggaaagagcacgatagagcaccaggctaagaggcacgagatcaaggcggtagtcacttccgctctgcagctagcatttcaaccatatgtggatcctttcatttctcagctccctggattccttcccctaaattaggacctattatttacctgtaggtaagcaagctactgtagctcttctgaggtatctgccaggctgttttctgtagcctcagattgcctatctgcttagcctgagaacaggtagatgaaaactaaactgatgcctaggcccagggtcagtctcagatggaagctgggcctgggtggggaggctagcatgcgtggctccctgggtatttctgtcagtccccatggcaagcagtgatttagtaaaacaccccagagtcagggaagccaaccaccttgaaacctttagaacatctctgctttggagaaagacccagagatcaggcagaggtgcagattcaatcattactcataacctttgagagatggcaaatgggaggagtgttagtctttgttttggaattggaccattcttgcaaccaaaaggacttagagcagtttgctcataaagacatcctttattataaaaggaagtatttaaaggatgatagagaccatcagatagaagcagggaaggtagataacttttaggaccttgatgtgaggaaaagataaaatttaaacaataaatttgccacttagattttctagcagcaaagtccgaaaagatagttatatacaaaattctgttttctgaaaacaaaattgtgattcaccttcagaattggccattttttttgtgagtttccttgcatcaaggacactgagaaacacagtcattgtcttaggtgttctatgggaggaagtgaatagagcctttaggaacttcctggtcaagcttatggtgcttattttgatctgggccacttccctccttccagtcatgagtaatcatcaaggagcaagttggagtgtttcaggtgtatattttgtagaacccaaaagattggagccttaacaataaacatcagcactaagtgacctgttc

SEQ ID NO: 10529 - protein, 271 aa, Homo sapiens; identical to SEQ ID NO: 1625

SEQ ID NO: 10530 - DNA, 198 bp, Homo sapiens
cgcgggcacagcgtcctccaagaggccaccttgctgagaggcagacttcccatccacaaaatgggatgacaaaacggctcagagttgaaaccacttctccaaggagacacaactgctgcccgcagagctgaagctcctgacccactatcaaatttcaatcatttatttgcctaccccctttatgatttttaccacccg

SEQ ID NO: 10531 - protein, 42 aa, Homo sapiens
QNGSELKPLLQGDTTAARRAEAPDPLSNFNHLFAYPLYDFYH

SEQ ID NO: 10532 - DNA, 701 bp, Homo sapiens
gaggggccacgccccgctcgcactccctggcggaacctttcagtgctgcgctcgcgttgccaacccggcgcgcctcacgcagttgcgcccgctgttgggactacttccggcttccccgccccgccccgtccccgggcgtctccattttggtctcagacgccgaagtcgcgggcgctcatggcgggcctggaggtactgttcgcatcggcagcgccggccatcacctgcaggcaggacgcgctcgtctgcttcttgcattgggaagtggtgacacacggttacttcggcttgggtgtcggtgaccagccgggtcccaatgataagaagtcagaactgctgccagctgggtggaacaacaataaagacctgtatgtcctccggtatgagtataaggatgggtccagaaagctccttgtgaaagccatcaccgtggagagcagcatgatcctcaatgtgctggaatatggctcacagcaagtggcagacttgaccctgaacttggatgattatatcgatgcagaacacctgggtgacttccacaggacctacaagaacagtgaggagcttcggtctcgtattgtgtctggaatcatcacacctatccatgagcagtgggaaaaggctaatgtaagcagtccccaccgggagttcccccctgctaccgccagagaggtggacccactccggattcctccacacca

SEQ ID NO: 10533 - protein, 173 aa, Homo sapiens; identical to SEQ ID NO: 10527

SEQ ID NO: 10534 - DNA, 1396 bp, Homo sapiens
ctacttccggcttccccgccccgccccgtccccgggcgtctccattttggtctcaggtgtggactcggcaagaaccagcgcaagagggaagcagagttatagctaccccggccgcggagccggctcactgcactacccccgcccccttctttcctccagacgccgaagtcgcgggcgctcatggcgggcctggaggtactgttcgcatcggcagcgccggccatcacctgcaggcaggacgcgctcgtctgcttcttgcattgggaagtggtgacacacggttacttcggcttgggtgtcggtgaccagccgggtcccaatgataagaagtcagaactgctgccagctgggtggaacaacaataaagacctgtatgtcctccggtatgagtataaggatgggtccagaaagctccttgtgaaagccatcaccgtggagagcagcatgatcctcaatgtgctggaatatggctcacagcaagtggcagacttgaccctgaacttggatgattatatcgatgcagaacacctgggtgacttccacaggacctacaagaacagtgaggagcttcggtctcgtattgtgtctggaatcatcacacctatccatgagcagtgggaaaaggctaatgtaagcagtccccaccgggagttcccccctgctaccgccagagaggtggacccactccggattcctccacaccacccacacaccagtcggcagcctccctggtgtgatcccctgggcccgtttgttgtcgggggagaagacttagacccttttgggcctcggagaggtggcatgattgtggatcccctgagatctggcttcccaagagcacttattgacccttcctcaggcctcccgaaccgacttcctccaggcgctgtgcccccaggagctcgctttgacccctttggacccattgggaccagcccacccggacctaacccagaccatctccccccgccgggctacgatgacatgtacctgtgaaggcctcaagaatgtaacatcccaggcttccctccattctcctggagctgccaccgctgtccccatcagcaaccatgttcttgcaggctgggggcaagggattctgctcatgtgtttgcagaccggctgggatagcctccccaccccttatcagagccaagacacctgctgcagctctccacctagctgcagatagctcccaaagagaaatcagtgtgtctctttcaccatcagctcctcccctttcaccaccagctcctctccacttcccaagggagactccggcaaccttcagcaacatatatcctcgaccagatgcagtgctataagaacagaacgcattttggatgttattattaagaaccaaatgtcaatacagaattcatgttgccggtttccc

SEQ ID NO: 10535 - protein, 271 aa, Homo sapiens; identical to SEQ ID NO: 1625

SEQ ID NO: 10536 - DNA, 2046 bp, Homo sapiens
ctacttccggcttccccgccccgccccgtccccgggcgtctccattttggtctcaggtgtggactcggcaagaaccagcgcaagagggaagcagagttatagctaccccggccgcggagccggctcactgcactacccccgcccccttctttcctccagacgccgaagtcgcgggcgctcatggcgggcctggaggtactgttcgcatcggcagcgccggccatcacctgcaggcaggacgcgctcgtctgcttcttgcattgggaagtggtgacacacggttacttcggcttgggtgtcggtgaccagccgggtcccaatgataagaagtcagaactgctgccagctgggtggaacaacaataaagacctgtatgtcctccggtatgagtataaggatgggtccagaaagctccttgtgaaagccatcaccgtggagagcagcatgatcctcaatgtgctggaatatggctcacagcaagtggcagacttgaccctgaacttggatgattatatcgatgcagaacacctgggtgacttccacaggacctacaagaacagtgaggagcttcggtctcgtattgtgtctggaatcatcacacctatccatgagcagtgggaaaaggctaatgtaagcagtccccaccgggagttcccccctgctaccgccagagaggtggacccactccggattcctccacaccacccacacaccagtcggcagcctccctggtgtgatcccctgggcccgtttgttgtcgggggagaagacttagacccttttgggcctcggagaggtggcatgattgtggatcccctgagatctggcttcccaagagcacttattgacccttcctcaggcctcccgaaccgacttcctccaggcgctgtgcccccaggagctcgctttgacccctttggacccattgggaccagcccacccggcccgaggcctgacagacgcgggcagtgatgagccctgttctggagtggaaagagcacgatagagcaccaggctaagaggcacgagatcaaggcggtagtcacttccgctctgcagctagcatttcaaccatatgtggatcctttcatttctcagctccctggattccttcccctaaattaggacctattatttacctgtaggtaagcaagctactgtagctcttctgaggtatctgccaggctgttttctgtagcctcagattgcctatctgcttagcctgagaacaggtagatgaaaactaaactgatgcctaggcccagggtcagtctcagatggaagctgggcctgggtggggaggctagcatgcgtggctccctgggtatttctgtcagtccccatggcaagcagtgatttagtaaaacaccccagagtcagggaagccaaccaccttgaaacctttagaacatctctgctttggagaaagacccagagatcaggcagaggtgcagattcaatcattactcataacctttgagagatggcaaatgggaggagtgttagtctttgttttggaattggaccattcttgcaaccaaaaggacttagagcagtttgctcataaagacatcctttattataaaaggaagtatttaaaggatgatagagaccatcagatagaagcagggaaggtagataacttttaggaccttgatgtgaggaaaagataaaatttaaacaataaatttgccacttagattttctagcagcaaagtccgaaaagatagttatatacaaaattctgttttctgaaaacaaaattgtgattcaccttcagaattggccattttttttgtgagtttccttgcatcaaggacactgagaaacacagtcattgtcttaggtgttctatgggaggaagtgaatagagcctttaggaacttcctggtcaagcttatggtgcttattttgatctgggccacttccctccttccagtcatgagtaatcatcaaggagcaagttggagtgtttcaggtgtatattttgtagaacccaaaagattggagccttaacaataaacatcagcactaagtgacctgttc

SEQ ID NO: 10537 - protein, 263 aa, Homo sapiens
MAGLEVLFASAAPAITCRQDALVCFLHWEVVTHGYFGLGVGDQPGPNDKKSELLPAGWNNNKDLYVLRYEYKDGSRKLLVKAITVESSMILNVLEYGSQQVADLTLNLDDYIDAEHLGDFHRTYKNSEELRSRIVSGIITPIHEQWEKANVSSPHREFPPATAREVDPLRIPPHHPHTSRQPPWCDPLGPFVVGGEDLDPFGPRRGGMIVDPLRSGFPRALIDPSSGLPNRLPPGAVPPGARFDPFGPIGTSPPGPRPDRRGQ

SEQ ID NO: 10538 - DNA, 3244 bp, Homo sapiens
ctacttccggcttccccgccccgccccgtccccgggcgtctccattttggtctcaggtgtggactcggcaagaaccagcgcaagagggaagcagagttatagctaccccggccgcggagccggctcactgcactacccccgcccccttctttcctccagacgccgaagtcgcgggcgctcatggcgggcctggaggtactgttcgcatcggcagcgccggccatcacctgcaggcaggacgcgctcgtctgcttcttgcattgggaagtggtgacacacggttacttcggcttgggtgtcggtgaccagccgggtcccaatgataagaagtcagaactgctgccagctgggtggaacaacaataaagacctgtatgtcctccggtatgagtataaggatgggtccagaaagctccttgtgaaagccatcaccgtggagagcagcatgatcctcaatgtgctggaatatggctcacagcaagtggcagacttgaccctgaacttggatgattatatcgatgcagaacacctgggtgacttccacaggacctacaagaacagtgaggagcttcggtctcgtattgtgtctggaatcatcacacctatccatgagcagtgggaaaaggctaatgtaagcagtccccaccgggagttcccccctgctaccgccagagaggtggacccactccggattcctccacaccacccacacaccagtcggcagcctccctggtgtgatcccctgggcccgtttgttgtcgggggagaagacttagacccttttgggcctcggagaggtggcatgattgtggatcccctgagatctggcttcccaagagcacttattgacccttcctcaggcctcccgaaccgacttcctccaggcgctgtgcccccaggagctcgctttgacccctttggacccattgggaccagcccacccggacctaacccagaccatctccccccgccgggctacgatgacatgtacctgtgaaggcctcaagaatgtaacatcccaggcttccctccattctcctggagctgccaccgctgtccccatcagcaaccatgttcttgcaggctgggggcaagggattctgctcatgtgtttgcagaccggctgggatagcctccccaccccttatcagagccaagacacctgctgcagctctccacctagctgcagatagctcccaaagagaaatcagtgtgtctctttcaccatcagctcctcccctttcaccaccagctcctctccacttcccaagggagactccggcaaccttcagcaacatatatcctcgaccagatgcagtgctataagaacagaacgcattttggatgttattattaagaaccaaatgtcaatacagaattcatgttgccggtttcccacttttctttttacattaatgcatagctgcttccatttatgagactttagagtttgagtttctgtagggctgaatgactctttttcctgcccagggcccattcttgcttctcaggcaccttccgtttattaattgccattgctcctgacatcactaagatgggtccccttctggctgcatgaatggaaatgagtgactggaaatcccataggccacaagaatgactttcacaagggcaggaacattgtggaaagactgcatcattctgatgaggcaaaatcctccagctattcctgtctgggccagttttgtaggtccatctgtgcatgggcagcagtagtcaaaaagccaaggaaaaaacagagcagacctgaaggctaatcttatttttgccactaacttagtgaatgaccctaagcaagttccttctcctcttagggccttgtgccaagcctatgaaattggaggtggctttcctgctctaaagcattttgatgtctcattctgtgtttggtaacccctataaactggggcagaggaaaagaatgatggttcaaggccatacttcccttgaaccttgtgtggttcttgcctaactctgtggtttttggaccccatggggcccagacagagcacaggagcatgggctgcctctgagtgtggtgttgaacttcgggaggagcagggagccctgcaccttgtgtcctggcccacctgacctttggtgttctccggatccttttcagcccgaggcctgacagacgcgggcagtgatgagccctgttctggagtggaaagagcacgatagagcaccaggctaagaggcacgagatcaaggcggtagtcacttccgctctgcagctagcatttcaaccatatgtggatcctttcatttctcagctccctggattccttcccctaaattaggacctattatttacctgtaggtaagcaagctactgtagctcttctgaggtatctgccaggctgttttctgtagcctcagattgcctatctgcttagcctgagaacaggtagatgaaaactaaactgatgcctaggcccagggtcagtctcagatggaagctgggcctgggtggggaggctagcatgcgtggctccctgggtatttctgtcagtccccatggcaagcagtgatttagtaaaacaccccagagtcagggaagccaaccaccttgaaacctttagaacatctctgctttggagaaagacccagagatcaggcagaggtgcagattcaatcattactcataacctttgagagatggcaaatgggaggagtgttagtctttgttttggaattggaccattcttgcaaccaaaaggacttagagcagtttgctcataaagacatcctttattataaaaggaagtatttaaaggatgatagagaccatcagatagaagcagggaaggtagataacttttaggaccttgatgtgaggaaaagataaaatttaaacaataaatttgccacttagattttctagcagcaaagtccgaaaagatagttatatacaaaattctgttttctgaaaacaaaattgtgattcaccttcagaattggccattttttttgtgagtttccttgcatcaaggacactgagaaacacagtcattgtcttaggtgttctatgggaggaagtgaatagagcctttaggaacttcctggtcaagcttatggtgcttattttgatctgggccacttccctccttccagtcatgagtaatcatcaaggagcaagttggagtgtttcaggtgtatattttgtagaacccaaaagattggagccttaacaataaacatcagcactaagtgacctgttc

SEQ ID NO: 10539 - protein, 271 aa, Homo sapiens; identical to SEQ ID NO: 1625

SEQ ID NO: 10540 - DNA, 4910 bp, Homo sapiens
ctacttccggcttccccgccccgccccgtccccgggcgtctccattttggtctcaggtgtggactcggcaagaaccagcgcaagagggaagcagagttatagctaccccggccgcggagccggctcactgcactacccccgcccccttctttcctccagacgccgaagtcgcgggcgctcatggcgggcctggaggtactgttcgcatcggcagcgccggccatcacctgcaggcaggacgcgctcgtctgcttcttgcattgggaagtggtgacacacggttacttcggcttgggtgtcggtgaccagccgggtcccaatgataagaagtcagaactgctgccagctgggtggaacaacaataaagacctgtatgtcctccggtatgagtataaggatgggtccagaaagctccttgtgaaagccatcaccgtggagagcagcatgatcctcaatgtgctggaatatggctcacagcaagtggcagacttgaccctgaacttggatgattatatcgatgcagaacacctgggtgacttccacaggacctacaagaacagtgaggagcttcggtctcgtattgtgtctggaatcatcacacctatccatgagcagtgggaaaaggctaatgtaagcagtccccaccgggagttcccccctgctaccgccagagaggtggacccactccggattcctccacaccacccacacaccagtcggcagcctccctggtgtgatcccctgggcccgtttgttgtcgggggagaagacttagacccttttgggcctcggagaggtggcatgattgtggatcccctgagatctggcttcccaagagcacttattgacccttcctcaggcctcccgaaccgacttcctccaggcgctgtgcccccaggagctcgctttgacccctttggacccattgggaccagcccacccggacctaacccagaccatctccccccgccgggctacgatgacatgtacctgtgaaggcctcaagaatgtaacatcccaggcttccctccattctcctggagctgccaccgctgtccccatcagcaaccatgttcttgcaggctgggggcaagggattctgctcatgtgtttgcagaccggctgggatagcctccccaccccttatcagagccaagacacctgctgcagctctccacctagctgcagatagctcccaaagagaaatcagtgtgtctctttcaccatcagctcctcccctttcaccaccagctcctctccacttcccaagggagactccggcaaccttcagcaacatatatcctcgaccagatgcagtgctataagaacagaacgcattttggatgttattattaagaaccaaatgtcaatacagaattcatgttgccggtttcccacttttctttttacattaatgcatagctgcttccatttatgagactttagagtttgagtttctgtagggctgaatgactctttttcctgcccagggcccattcttgcttctcaggcaccttccgtttattaattgccattgctcctgacatcactaagatgggtccccttctggctgcatgaatggaaatgagtgactggaaatcccataggccacaagaatgactttcacaagggcaggaacattgtggaaagactgcatcattctgatgaggcaaaatcctccagctattcctgtctgggccagttttgtaggtccatctgtgcatgggcagcagtagtcaaaaagccaaggaaaaaacagagcagacctgaaggctaatcttatttttgccactaacttagtgaatgaccctaagcaagttccttctcctcttagggccttgtgccaagcctatgaaattggaggtggctttcctgctctaaagcattttgatgtctcattctgtgtttggtaacccctataaactggggcagaggaaaagaatgatggttcaaggccatacttcccttgaaccttgtgtggttcttgcctaactctgtggtttttggaccccatggggcccagacagagcacaggagcatgggctgcctctgagtgtggtgttgaacttcgggaggagcagggagccctgcaccttgtgtcctggcccacctgacctttggtgttctccggatccttttcagcccgaggcctgacagacgcgggcagtgatgagccctgttctggagtggaaagagcacgatagagcaccaggctaagaggcacgagatcaaggcggtagtcacttccgctctgcagctagcatttcaaccatatgtggatcctttcatttctcagctccctggattccttcccctaaattaggacctattatttacctgtaggtaagcaagctactgtagctcttctgaggtatctgccaggctgttttctgtagcctcagattgcctatctgcttagcctgagaacaggtagatgaaaactaaactgatgcctaggcccagggtcagtctcagatggaagctgggcctgggtggggaggctagcatgcgtggctccctgggtatttctgtcagtccccatggcaagcagtgatttagtaaaacaccccagagtcagggaagccaaccaccttgaaacctttagaacatctctgctttggagaaagacccagagatcaggcagaggtgcagattcaatcattactcataacctttgagagatggcaaatgggaggagtgttagtctttgttttggaattggaccattcttgcaaccaaaaggacttagagcagtttgctcataaagacatcctttattataaaaggaagtatttaaaggatgatagagaccatcagatagaagcagggaaggtagataacttttaggaccttgatgtgaggaaaagataaaatttaaacaataaatttgccacttagattttctagcagcaaagtccgaaaagatagttatatacaaaattctgttttctgaaaacaaaattgtgattcaccttcagaattggccattttttttgtgagtttccttgcatcaaggacactgagaaacacagtcattgtcttaggtgttctatgggaggaagtgaatagagcctttaggaacttcctggtcaagcttatggtgcttattttgatctgggccacttccctccttccagtcatgagtaatcatcaaggagcaagttggagtgtttcaggtgtatattttgtagaacccaaaagattggagccttaacaataaacatcagcactaagtgacctgttcctccttttttaaatagcagctttattgagatataatttacatacccataatttacatacctgtttaaagtatacaattcagtggatttagtatgttcacagtgttgcacatccaccaccatttctaattcctgaacattttcaccacctcaaaaagaaaccacacacccattggcatgactccccattcccttgctcccagccccaggcaaccactaacatctgtctctaaagattttttttttttttctggacagttctcataagtggaatcactcagtattatggccttttgtgtctggcttctttcatttcatgtgatgttttcaagattcattcatgctgtagcatgtatccatggtatggatatatcacattttgcttatccttttatcagttgatggacagttgggttgtttctacaaaaaggctattatgagtaatgcagccaagaacatttgtgtaccagtttttgagttttcagttgtttgagtttcagatgttttcagttcatttgggtatataccaaggagtggaattgctggttcacatggtagctctatattctactttgtgaggaattgtcagactgttttccacggaagctgcaccattttacatttccactggtaatttatgagggttccagtttccccacatcttcaccaactcttgttatttttcatgcttatggccatcctagttagcgtgaagtagcatctcattgtggtcttctcttccattttttaaaaaagaattttgacctacaccaagcaaggcagagaccagagtcagtcccccttggggagcaatctgtggttttgataatcaccaccttgggatgaacatggctggtgagctgcagagcagttgatttgacttttggggatggttctaggctggatgtgatacagggcaggttttgtctctagagaaagttctcatgaccttcaggtctaatgagattcagatcatcactttggtttggtttgaaatttctttgtttatccagtgaattacaagtagaataaagatctggttctaaattgtcttttggtggtgaagtgccatagaccatttcggaccatttctatgatgtaccagcagcccccacatcacacctcctcttccttggcttgtctcttccccaattcttagagttagcagtgtttcttactgcattcatctcctcagtcataagtgtctgtcaacctccgttgtgaagtcatgagtctcttgagactgaaactccaagaatgtattgtgctcacagtggcgatggtgttcctgtgctggatggtcagtggttgttgacatgtagttagaaaataggtagcaagttccacgcagcctcactctttggaacctagtttctcctatggcctccctttctactgttgttaataacattctattaatgatccatgcctctcttcacaggaggaatattagaatctatggagcagttagtattctttgtcacctaaatttgtctacttctgtacatttccaataaggcaccaccagggcaagggaagattccccacatgtatatccccagctgtttctgtcataaaacttgcatgtgtataaaccactattgactttttgcaccaaaggagatattcaaggacagacatccaagtccccagccctttattgccctt

SEQ ID NO: 10541 - protein, 271 aa, Homo sapiens; identical to SEQ ID NO: 1625

SEQ ID NO: 10542 - DNA, 3712 bp, Homo sapiens
ctacttccggcttccccgccccgccccgtccccgggcgtctccattttggtctcaggtgtggactcggcaagaaccagcgcaagagggaagcagagttatagctaccccggccgcggagccggctcactgcactacccccgcccccttctttcctccagacgccgaagtcgcgggcgctcatggcgggcctggaggtactgttcgcatcggcagcgccggccatcacctgcaggcaggacgcgctcgtctgcttcttgcattgggaagtggtgacacacggttacttcggcttgggtgtcggtgaccagccgggtcccaatgataagaagtcagaactgctgccagctgggtggaacaacaataaagacctgtatgtcctccggtatgagtataaggatgggtccagaaagctccttgtgaaagccatcaccgtggagagcagcatgatcctcaatgtgctggaatatggctcacagcaagtggcagacttgaccctgaacttggatgattatatcgatgcagaacacctgggtgacttccacaggacctacaagaacagtgaggagcttcggtctcgtattgtgtctggaatcatcacacctatccatgagcagtgggaaaaggctaatgtaagcagtccccaccgggagttcccccctgctaccgccagagaggtggacccactccggattcctccacaccacccacacaccagtcggcagcctccctggtgtgatcccctgggcccgtttgttgtcgggggagaagacttagacccttttgggcctcggagaggtggcatgattgtggatcccctgagatctggcttcccaagagcacttattgacccttcctcaggcctcccgaaccgacttcctccaggcgctgtgcccccaggagctcgctttgacccctttggacccattgggaccagcccacccggcccgaggcctgacagacgcgggcagtgatgagccctgttctggagtggaaagagcacgatagagcaccaggctaagaggcacgagatcaaggcggtagtcacttccgctctgcagctagcatttcaaccatatgtggatcctttcatttctcagctccctggattccttcccctaaattaggacctattatttacctgtaggtaagcaagctactgtagctcttctgaggtatctgccaggctgttttctgtagcctcagattgcctatctgcttagcctgagaacaggtagatgaaaactaaactgatgcctaggcccagggtcagtctcagatggaagctgggcctgggtggggaggctagcatgcgtggctccctgggtatttctgtcagtccccatggcaagcagtgatttagtaaaacaccccagagtcagggaagccaaccaccttgaaacctttagaacatctctgctttggagaaagacccagagatcaggcagaggtgcagattcaatcattactcataacctttgagagatggcaaatgggaggagtgttagtctttgttttggaattggaccattcttgcaaccaaaaggacttagagcagtttgctcataaagacatcctttattataaaaggaagtatttaaaggatgatagagaccatcagatagaagcagggaaggtagataacttttaggaccttgatgtgaggaaaagataaaatttaaacaataaatttgccacttagattttctagcagcaaagtccgaaaagatagttatatacaaaattctgttttctgaaaacaaaattgtgattcaccttcagaattggccattttttttgtgagtttccttgcatcaaggacactgagaaacacagtcattgtcttaggtgttctatgggaggaagtgaatagagcctttaggaacttcctggtcaagcttatggtgcttattttgatctgggccacttccctccttccagtcatgagtaatcatcaaggagcaagttggagtgtttcaggtgtatattttgtagaacccaaaagattggagccttaacaataaacatcagcactaagtgacctgttcctccttttttaaatagcagctttattgagatataatttacatacccataatttacatacctgtttaaagtatacaattcagtggatttagtatgttcacagtgttgcacatccaccaccatttctaattcctgaacattttcaccacctcaaaaagaaaccacacacccattggcatgactccccattcccttgctcccagccccaggcaaccactaacatctgtctctaaagattttttttttttttctggacagttctcataagtggaatcactcagtattatggccttttgtgtctggcttctttcatttcatgtgatgttttcaagattcattcatgctgtagcatgtatccatggtatggatatatcacattttgcttatccttttatcagttgatggacagttgggttgtttctacaaaaaggctattatgagtaatgcagccaagaacatttgtgtaccagtttttgagttttcagttgtttgagtttcagatgttttcagttcatttgggtatataccaaggagtggaattgctggttcacatggtagctctatattctactttgtgaggaattgtcagactgttttccacggaagctgcaccattttacatttccactggtaatttatgagggttccagtttccccacatcttcaccaactcttgttatttttcatgcttatggccatcctagttagcgtgaagtagcatctcattgtggtcttctcttccattttttaaaaaagaattttgacctacaccaagcaaggcagagaccagagtcagtcccccttggggagcaatctgtggttttgataatcaccaccttgggatgaacatggctggtgagctgcagagcagttgatttgacttttggggatggttctaggctggatgtgatacagggcaggttttgtctctagagaaagttctcatgaccttcaggtctaatgagattcagatcatcactttggtttggtttgaaatttctttgtttatccagtgaattacaagtagaataaagatctggttctaaattgtcttttggtggtgaagtgccatagaccatttcggaccatttctatgatgtaccagcagcccccacatcacacctcctcttccttggcttgtctcttccccaattcttagagttagcagtgtttcttactgcattcatctcctcagtcataagtgtctgtcaacctccgttgtgaagtcatgagtctcttgagactgaaactccaagaatgtattgtgctcacagtggcgatggtgttcctgtgctggatggtcagtggttgttgacatgtagttagaaaataggtagcaagttccacgcagcctcactctttggaacctagtttctcctatggcctccctttctactgttgttaataacattctattaatgatccatgcctctcttcacaggaggaatattagaatctatggagcagttagtattctttgtcacctaaatttgtctacttctgtacatttccaataaggcaccaccagggcaagggaagattccccacatgtatatccccagctgtttctgtcataaaacttgcatgtgtataaaccactattgactttttgcaccaaaggagatattcaaggacagacatccaagtccccagccctttattgccctt

SEQ ID NO: 10543 - protein, 263 aa, Homo sapiens; identical to SEQ ID NO: 10537

SEQ ID NO: 10544 - DNA, 1932 bp, Homo sapiens
tacttccggcttccccgccccgccccgtccccgggcgtctccattttggtctcaggtgtggactcggcaagaaccagcgcaagagggaagcagagttatagctaccccggccgcggagccggctcactgcactacccccgcccccttctttcctccagacgccgaagtcgcgggcgctcatggcgggcctggaggtactgttcgcatcggcagcgccggccatcacctgcaggcaggacgcgctcgtctgcttcttgcattgggaagtggtgacacacggttacttcggcttgggtgtcggtgaccagccgggtcccaatgataagaagtcagaactgctgccagctgggtggaacaacaataaagacctgtatgtcctccggtatgagtataaggatgggtccagaaagctccttgtgaaagccatcaccgtggagagcagcatgatcctcaatgtgctggaatatggctcacagcaagtggcagacttgaccctgaacttggatgattatatcgatgcagaacacctgggtgacttccacaggacctacaagaacagtgaggagcttcggtctcgtattgtgtctggaatcatcacacctatccatgagcagtgggaaaaggctaatgtaagcagtccccaccgggagttcccccctgctaccgccagagcctcggagaggtggcatgattgtggatcccctgagatctggcttcccaagagcacttattgacccttcctcaggcctcccgaaccgacttcctccaggcgctgtgcccccaggagctcgctttgacccctttggacccattgggaccagcccacccggcccgaggcctgacagacgcgggcagtgatgagccctgttctggagtggaaagagcacgatagagcaccaggctaagaggcacgagatcaaggcggtagtcacttccgctctgcagctagcatttcaaccatatgtggatcctttcatttctcagctccctggattccttcccctaaattaggacctattatttacctgtaggtaagcaagctactgtagctcttctgaggtatctgccaggctgttttctgtagcctcagattgcctatctgcttagcctgagaacaggtagatgaaaactaaactgatgcctaggcccagggtcagtctcagatggaagctgggcctgggtggggaggctagcatgcgtggctccctgggtatttctgtcagtccccatggcaagcagtgatttagtaaaacaccccagagtcagggaagccaaccaccttgaaacctttagaacatctctgctttggagaaagacccagagatcaggcagaggtgcagattcaatcattactcataacctttgagagatggcaaatgggaggagtgttagtctttgttttggaattggaccattcttgcaaccaaaaggacttagagcagtttgctcataaagacatcctttattataaaaggaagtatttaaaggatgatagagaccatcagatagaagcagggaaggtagataacttttaggaccttgatgtgaggaaaagataaaatttaaacaataaatttgccacttagattttctagcagcaaagtccgaaaagatagttatatacaaaattctgttttctgaaaacaaaattgtgattcaccttcagaattggccattttttttgtgagtttccttgcatcaaggacactgagaaacacagtcattgtcttaggtgttctatgggaggaagtgaatagagcctttaggaacttcctggtcaagcttatggtgcttattttgatctgggccacttccctccttccagtcatgagtaatcatcaaggagcaagttggagtgtttcaggtgtatattttgtagaacccaaaagattggagccttaacaataaacatcagcactaagtgacctgttc

SEQ ID NO: 10545 - protein, 184 aa, Homo sapiens
MAGLEVLFASAAPAITCRQDALVCFLHWEVVTHGYFGLGVGDQPGPNDKKSELLPAGWNNNKDLYVLRYEYKDGSRKLLVKAITVESSMILNVLEYGSQQVADLTLNLDDYIDAEHLGDFHRTYKNSEELRSRIVSGIITPIHEQWEKANVSSPHREFPPATARASERWHDCGSPEIWLPKSTY

SEQ ID NO: 10546 - DNA, 3598 bp, Homo sapiens
tacttccggcttccccgccccgccccgtccccgggcgtctccattttggtctcaggtgtggactcggcaagaaccagcgcaagagggaagcagagttatagctaccccggccgcggagccggctcactgcactacccccgcccccttctttcctccagacgccgaagtcgcgggcgctcatggcgggcctggaggtactgttcgcatcggcagcgccggccatcacctgcaggcaggacgcgctcgtctgcttcttgcattgggaagtggtgacacacggttacttcggcttgggtgtcggtgaccagccgggtcccaatgataagaagtcagaactgctgccagctgggtggaacaacaataaagacctgtatgtcctccggtatgagtataaggatgggtccagaaagctccttgtgaaagccatcaccgtggagagcagcatgatcctcaatgtgctggaatatggctcacagcaagtggcagacttgaccctgaacttggatgattatatcgatgcagaacacctgggtgacttccacaggacctacaagaacagtgaggagcttcggtctcgtattgtgtctggaatcatcacacctatccatgagcagtgggaaaaggctaatgtaagcagtccccaccgggagttcccccctgctaccgccagagcctcggagaggtggcatgattgtggatcccctgagatctggcttcccaagagcacttattgacccttcctcaggcctcccgaaccgacttcctccaggcgctgtgcccccaggagctcgctttgacccctttggacccattgggaccagcccacccggcccgaggcctgacagacgcgggcagtgatgagccctgttctggagtggaaagagcacgatagagcaccaggctaagaggcacgagatcaaggcggtagtcacttccgctctgcagctagcatttcaaccatatgtggatcctttcatttctcagctccctggattccttcccctaaattaggacctattatttacctgtaggtaagcaagctactgtagctcttctgaggtatctgccaggctgttttctgtagcctcagattgcctatctgcttagcctgagaacaggtagatgaaaactaaactgatgcctaggcccagggtcagtctcagatggaagctgggcctgggtggggaggctagcatgcgtggctccctgggtatttctgtcagtccccatggcaagcagtgatttagtaaaacaccccagagtcagggaagccaaccaccttgaaacctttagaacatctctgctttggagaaagacccagagatcaggcagaggtgcagattcaatcattactcataacctttgagagatggcaaatgggaggagtgttagtctttgttttggaattggaccattcttgcaaccaaaaggacttagagcagtttgctcataaagacatcctttattataaaaggaagtatttaaaggatgatagagaccatcagatagaagcagggaaggtagataacttttaggaccttgatgtgaggaaaagataaaatttaaacaataaatttgccacttagattttctagcagcaaagtccgaaaagatagttatatacaaaattctgttttctgaaaacaaaattgtgattcaccttcagaattggccattttttttgtgagtttccttgcatcaaggacactgagaaacacagtcattgtcttaggtgttctatgggaggaagtgaatagagcctttaggaacttcctggtcaagcttatggtgcttattttgatctgggccacttccctccttccagtcatgagtaatcatcaaggagcaagttggagtgtttcaggtgtatattttgtagaacccaaaagattggagccttaacaataaacatcagcactaagtgacctgttcctccttttttaaatagcagctttattgagatataatttacatacccataatttacatacctgtttaaagtatacaattcagtggatttagtatgttcacagtgttgcacatccaccaccatttctaattcctgaacattttcaccacctcaaaaagaaaccacacacccattggcatgactccccattcccttgctcccagccccaggcaaccactaacatctgtctctaaagattttttttttttttctggacagttctcataagtggaatcactcagtattatggccttttgtgtctggcttctttcatttcatgtgatgttttcaagattcattcatgctgtagcatgtatccatggtatggatatatcacattttgcttatccttttatcagttgatggacagttgggttgtttctacaaaaaggctattatgagtaatgcagccaagaacatttgtgtaccagtttttgagttttcagttgtttgagtttcagatgttttcagttcatttgggtatataccaaggagtggaattgctggttcacatggtagctctatattctactttgtgaggaattgtcagactgttttccacggaagctgcaccattttacatttccactggtaatttatgagggttccagtttccccacatcttcaccaactcttgttatttttcatgcttatggccatcctagttagcgtgaagtagcatctcattgtggtcttctcttccattttttaaaaaagaattttgacctacaccaagcaaggcagagaccagagtcagtcccccttggggagcaatctgtggttttgataatcaccaccttgggatgaacatggctggtgagctgcagagcagttgatttgacttttggggatggttctaggctggatgtgatacagggcaggttttgtctctagagaaagttctcatgaccttcaggtctaatgagattcagatcatcactttggtttggtttgaaatttctttgtttatccagtgaattacaagtagaataaagatctggttctaaattgtcttttggtggtgaagtgccatagaccatttcggaccatttctatgatgtaccagcagcccccacatcacacctcctcttccttggcttgtctcttccccaattcttagagttagcagtgtttcttactgcattcatctcctcagtcataagtgtctgtcaacctccgttgtgaagtcatgagtctcttgagactgaaactccaagaatgtattgtgctcacagtggcgatggtgttcctgtgctggatggtcagtggttgttgacatgtagttagaaaataggtagcaagttccacgcagcctcactctttggaacctagtttctcctatggcctccctttctactgttgttaataacattctattaatgatccatgcctctcttcacaggaggaatattagaatctatggagcagttagtattctttgtcacctaaatttgtctacttctgtacatttccaataaggcaccaccagggcaagggaagattccccacatgtatatccccagctgtttctgtcataaaacttgcatgtgtataaaccactattgactttttgcaccaaaggagatattcaaggacagacatccaagtccccagccctttattgccctt

SEQ ID NO: 10547 - protein, 184 aa, Homo sapiens; identical to SEQ ID NO: 10545

SEQ ID NO: 10548 - DNA, 613 bp, Homo sapiens
ggcttccccgccccgccccgtccccgggcgtctccattttggtctcaggtgtggactcggcaagaaccagcgcaagagggaagcagagttatagctaccccggccgcggagccggctcactgcactacccccgcccccttctttcctccagacgccgaagtcgcgggcgctcatggcgggcctggaggtactgttcgcatcggcagcgccggccatcacctgcaggcaggacgcgctcgtctgcttcttgcattgggaagtggtgacacacggttacttcggcttgggtgtcggtgaccagccgggtcccaatgataagaagtcagaactgctgccagctgggtggaacaacaataaagacctgtatgtcctccggtatgagtataaggatgggtccagaaagctccttgtgaaagccatcaccgtggagagcagcatgatcctcaatgtgctggacctacaagaacagtgaggagcttcggtctcgtattgtgtctggaatcatcacacctatccatgagcagtgggaaaaggctaatgtaagcagtccccaccgggagttcccccctgctaccgccagagaggtggacccactccggattcctccacacca

SEQ ID NO: 10549 - protein, 99 aa, Homo sapiens
MAGLEVLFASAAPAITCRQDALVCFLHWEVVTHGYFGLGVGDQPGPNDKKSELLPAGWNNNKDLYVLRYEYKDGSRKLLVKAITVESSMILNVLDLQEQ

SEQ ID NO: 10550 - DNA, 521 bp, Homo sapiens
ggcttccccgccccgccccgtccccgggcgtctccattttggtctcaggtgtggactcggcaagaaccagcgcaagagggaagcagagttatagctaccccggccgcggagccggctcactgcactacccccgcccccttctttcctccagacgccgaagtcgcgggcgctcatggcgggcctggaggtactgttcgcatcggcagcgccggccatcacctgcaggcaggacgcgctcgtctgcttcttgcattgggaagtggtgacacacggttacttcggcttgggtgtcggtgaccagtccacctagctgcagatagctcccaaagagaaatcagtgtgtctctttcaccatcagctcctcccctttcaccaccagctcctctccacttcccaagggagactccggcaaccttcagcaacatatatcctcgaccagatgcagtgctataagaacagaacgcattttggatgttattattaagaaccaaatgtcaatacagaattcatgttgccggttt

SEQ ID NO: 10551 - protein, 45 aa, Homo sapiens
MAGLEVLFASAAPAITCRQDALVCFLHWEVVTHGYFGLGVGDQST

SEQ ID NO: 10552 - DNA, 1274 bp, Homo sapiens
ggcttccccgccccgccccgtccccgggcgtctccattttggtctcaggtgtggactcggcaagaaccagcgcaagagggaagcagagttatagctaccccggccgcggagccggctcactgcactacccccgcccccttctttcctccagacgccgaagtcgcgggcgctcatggcgggcctggagccgggtcccaatgataagaagtcagaactgctgccagctgggtggaacaacaataaagacctgtatgtcctccggtatgagtataaggatgggtccagaaagctccttgtgaaagccatcaccgtggagagcagcatgatcctcaatgtgctggaatatggctcacagcaagtggcagacttgaccctgaacttggatgattatatcgatgcagaacacctgggtgacttccacaggacctacaagaacagtgaggagcttcggtctcgtattgtgtctggaatcatcacacctatccatgagcagtgggaaaaggctaatgtaagcagtccccaccgggagttcccccctgctaccgccagagaggtggacccactccggattcctccacaccacccacacaccagtcggcagcctccctggtgtgatcccctgggcccgtttgttgtcgggggagaagacttagacccttttgggcctcggagaggtggcatgattgtggatcccctgagatctggcttcccaagagcacttattgacccttcctcaggcctcccgaaccgacttcctccaggcgctgtgcccccaggagctcgctttgacccctttggacccattgggaccagcccacccggacctaacccagaccatctccccccgccgggctacgatgacatgtacctgtgaaggcctcaagaatgtaacatcccaggcttccctccattctcctggagctgccaccgctgtccccatcagcaaccatgttcttgcaggctgggggcaagggattctgctcatgtgtttgcagaccggctgggatagcctccccaccccttatcagagccaagacacctgctgcagctctccacctagctgcagatagctcccaaagagaaatcagtgtgtctctttcaccatcagctcctcccctttcaccaccagctcctctccacttcccaagggagactccggcaaccttcagcaacatatatcctcgaccagatgcagtgctataagaacagaacgcattttggatgttattattaagaaccaaatgtcaatacagaattcatgttgccggtttccc

SEQ ID NO: 10553 - protein, 233 aa, Homo sapiens
MAGLEPGPNDKKSELLPAGWNNNKDLYVLRYEYKDGSRKLLVKAITVESSMILNVLEYGSQQVADLTLNLDDYIDAEHLGDFHRTYKNSEELRSRIVSGIITPIHEQWEKANVSSPHREFPPATAREVDPLRIPPHHPHTSRQPPWCDPLGPFVVGGEDLDPFGPRRGGMIVDPLRSGFPRALIDPSSGLPNRLPPGAVPPGARFDPFGPIGTSPPGPNPDHLPPPGYDDMYL

SEQ ID NO: 10554 - DNA, 3122 bp, Homo sapiens
ggcttccccgccccgccccgtccccgggcgtctccattttggtctcaggtgtggactcggcaagaaccagcgcaagagggaagcagagttatagctaccccggccgcggagccggctcactgcactacccccgcccccttctttcctccagacgccgaagtcgcgggcgctcatggcgggcctggagccgggtcccaatgataagaagtcagaactgctgccagctgggtggaacaacaataaagacctgtatgtcctccggtatgagtataaggatgggtccagaaagctccttgtgaaagccatcaccgtggagagcagcatgatcctcaatgtgctggaatatggctcacagcaagtggcagacttgaccctgaacttggatgattatatcgatgcagaacacctgggtgacttccacaggacctacaagaacagtgaggagcttcggtctcgtattgtgtctggaatcatcacacctatccatgagcagtgggaaaaggctaatgtaagcagtccccaccgggagttcccccctgctaccgccagagaggtggacccactccggattcctccacaccacccacacaccagtcggcagcctccctggtgtgatcccctgggcccgtttgttgtcgggggagaagacttagacccttttgggcctcggagaggtggcatgattgtggatcccctgagatctggcttcccaagagcacttattgacccttcctcaggcctcccgaaccgacttcctccaggcgctgtgcccccaggagctcgctttgacccctttggacccattgggaccagcccacccggacctaacccagaccatctccccccgccgggctacgatgacatgtacctgtgaaggcctcaagaatgtaacatcccaggcttccctccattctcctggagctgccaccgctgtccccatcagcaaccatgttcttgcaggctgggggcaagggattctgctcatgtgtttgcagaccggctgggatagcctccccaccccttatcagagccaagacacctgctgcagctctccacctagctgcagatagctcccaaagagaaatcagtgtgtctctttcaccatcagctcctcccctttcaccaccagctcctctccacttcccaagggagactccggcaaccttcagcaacatatatcctcgaccagatgcagtgctataagaacagaacgcattttggatgttattattaagaaccaaatgtcaatacagaattcatgttgccggtttcccacttttctttttacattaatgcatagctgcttccatttatgagactttagagtttgagtttctgtagggctgaatgactctttttcctgcccagggcccattcttgcttctcaggcaccttccgtttattaattgccattgctcctgacatcactaagatgggtccccttctggctgcatgaatggaaatgagtgactggaaatcccataggccacaagaatgactttcacaagggcaggaacattgtggaaagactgcatcattctgatgaggcaaaatcctccagctattcctgtctgggccagttttgtaggtccatctgtgcatgggcagcagtagtcaaaaagccaaggaaaaaacagagcagacctgaaggctaatcttatttttgccactaacttagtgaatgaccctaagcaagttccttctcctcttagggccttgtgccaagcctatgaaattggaggtggctttcctgctctaaagcattttgatgtctcattctgtgtttggtaacccctataaactggggcagaggaaaagaatgatggttcaaggccatacttcccttgaaccttgtgtggttcttgcctaactctgtggtttttggaccccatggggcccagacagagcacaggagcatgggctgcctctgagtgtggtgttgaacttcgggaggagcagggagccctgcaccttgtgtcctggcccacctgacctttggtgttctccggatccttttcagcccgaggcctgacagacgcgggcagtgatgagccctgttctggagtggaaagagcacgatagagcaccaggctaagaggcacgagatcaaggcggtagtcacttccgctctgcagctagcatttcaaccatatgtggatcctttcatttctcagctccctggattccttcccctaaattaggacctattatttacctgtaggtaagcaagctactgtagctcttctgaggtatctgccaggctgttttctgtagcctcagattgcctatctgcttagcctgagaacaggtagatgaaaactaaactgatgcctaggcccagggtcagtctcagatggaagctgggcctgggtggggaggctagcatgcgtggctccctgggtatttctgtcagtccccatggcaagcagtgatttagtaaaacaccccagagtcagggaagccaaccaccttgaaacctttagaacatctctgctttggagaaagacccagagatcaggcagaggtgcagattcaatcattactcataacctttgagagatggcaaatgggaggagtgttagtctttgttttggaattggaccattcttgcaaccaaaaggacttagagcagtttgctcataaagacatcctttattataaaaggaagtatttaaaggatgatagagaccatcagatagaagcagggaaggtagataacttttaggaccttgatgtgaggaaaagataaaatttaaacaataaatttgccacttagattttctagcagcaaagtccgaaaagatagttatatacaaaattctgttttctgaaaacaaaattgtgattcaccttcagaattggccattttttttgtgagtttccttgcatcaaggacactgagaaacacagtcattgtcttaggtgttctatgggaggaagtgaatagagcctttaggaacttcctggtcaagcttatggtgcttattttgatctgggccacttccctccttccagtcatgagtaatcatcaaggagcaagttggagtgtttcaggtgtatattttgtagaacccaaaagattggagccttaacaataaacatcagcactaagtgacctgttc

SEQ ID NO: 10555 - protein, 233 aa, Homo sapiens; identical to SEQ ID NO: 10553

SEQ ID NO: 10556 - DNA, 3153 bp, Homo sapiens
ggcttccccgccccgccccgtccccgggcgtctccattttggtctcaggtgtggactcggcaagaaccagcgcaagagggaagcagagttatagctaccccggccgcggagccggctcactgcactacccccgcccccttctttcctccagacgccgaagtcgcgggcgctcatggcgggcctggaggtactgttcgcatcggcagcgccggccatcacctgcaggcaggacgcgctcgtctgcttcttgcattgggaagtggtgacacacggttacttcggcttgggtgtcggtgaccagccgggtcccaatgataagaagtcagaactgctgccagctgggtggaacaacaataaagacctgtatgtcctccggtatgagtataaggatgggtccagaaagctccttgtgaaagccatcaccgtggagagcagcatgatcctcaatgtgctggacctacaagaacagtgaggagcttcggtctcgtattgtgtctggaatcatcacacctatccatgagcagtgggaaaaggctaatgtaagcagtccccaccgggagttcccccctgctaccgccagagaggtggacccactccggattcctccacaccacccacacaccagtcggcagcctccctggtgtgatcccctgggcccgtttgttgtcgggggagaagacttagacccttttgggcctcggagaggtggcatgattgtggatcccctgagatctggcttcccaagagcacttattgacccttcctcaggcctcccgaaccgacttcctccaggcgctgtgcccccaggagctcgctttgacccctttggacccattgggaccagcccacccggacctaacccagaccatctccccccgccgggctacgatgacatgtacctgtgaaggcctcaagaatgtaacatcccaggcttccctccattctcctggagctgccaccgctgtccccatcagcaaccatgttcttgcaggctgggggcaagggattctgctcatgtgtttgcagaccggctgggatagcctccccaccccttatcagagccaagacacctgctgcagctctccacctagctgcagatagctcccaaagagaaatcagtgtgtctctttcaccatcagctcctcccctttcaccaccagctcctctccacttcccaagggagactccggcaaccttcagcaacatatatcctcgaccagatgcagtgctataagaacagaacgcattttggatgttattattaagaaccaaatgtcaatacagaattcatgttgccggtttcccacttttctttttacattaatgcatagctgcttccatttatgagactttagagtttgagtttctgtagggctgaatgactctttttcctgcccagggcccattcttgcttctcaggcaccttccgtttattaattgccattgctcctgacatcactaagatgggtccccttctggctgcatgaatggaaatgagtgactggaaatcccataggccacaagaatgactttcacaagggcaggaacattgtggaaagactgcatcattctgatgaggcaaaatcctccagctattcctgtctgggccagttttgtaggtccatctgtgcatgggcagcagtagtcaaaaagccaaggaaaaaacagagcagacctgaaggctaatcttatttttgccactaacttagtgaatgaccctaagcaagttccttctcctcttagggccttgtgccaagcctatgaaattggaggtggctttcctgctctaaagcattttgatgtctcattctgtgtttggtaacccctataaactggggcagaggaaaagaatgatggttcaaggccatacttcccttgaaccttgtgtggttcttgcctaactctgtggtttttggaccccatggggcccagacagagcacaggagcatgggctgcctctgagtgtggtgttgaacttcgggaggagcagggagccctgcaccttgtgtcctggcccacctgacctttggtgttctccggatccttttcagcccgaggcctgacagacgcgggcagtgatgagccctgttctggagtggaaagagcacgatagagcaccaggctaagaggcacgagatcaaggcggtagtcacttccgctctgcagctagcatttcaaccatatgtggatcctttcatttctcagctccctggattccttcccctaaattaggacctattatttacctgtaggtaagcaagctactgtagctcttctgaggtatctgccaggctgttttctgtagcctcagattgcctatctgcttagcctgagaacaggtagatgaaaactaaactgatgcctaggcccagggtcagtctcagatggaagctgggcctgggtggggaggctagcatgcgtggctccctgggtatttctgtcagtccccatggcaagcagtgatttagtaaaacaccccagagtcagggaagccaaccaccttgaaacctttagaacatctctgctttggagaaagacccagagatcaggcagaggtgcagattcaatcattactcataacctttgagagatggcaaatgggaggagtgttagtctttgttttggaattggaccattcttgcaaccaaaaggacttagagcagtttgctcataaagacatcctttattataaaaggaagtatttaaaggatgatagagaccatcagatagaagcagggaaggtagataacttttaggaccttgatgtgaggaaaagataaaatttaaacaataaatttgccacttagattttctagcagcaaagtccgaaaagatagttatatacaaaattctgttttctgaaaacaaaattgtgattcaccttcagaattggccattttttttgtgagtttccttgcatcaaggacactgagaaacacagtcattgtcttaggtgttctatgggaggaagtgaatagagcctttaggaacttcctggtcaagcttatggtgcttattttgatctgggccacttccctccttccagtcatgagtaatcatcaaggagcaagttggagtgtttcaggtgtatattttgtagaacccaaaagattggagccttaacaataaacatcagcactaagtgacctgttc

SEQ ID NO: 10557 - protein, 152 aa, Homo sapiens
MCWTYKNSEELRSRIVSGIITPIHEQWEKANVSSPHREFPPATAREVDPLRIPPHHPHTSRQPPWCDPLGPFVVGGEDLDPFGPRRGGMIVDPLRSGFPRALIDPSSGLPNRLPPGAVPPGARFDPFGPIGTSPPGPNPDHLPPPGYDDMYL

SEQ ID NO: 10558 - DNA, 4788 bp, Homo sapiens
ggcttccccgccccgccccgtccccgggcgtctccattttggtctcaggtgtggactcggcaagaaccagcgcaagagggaagcagagttatagctaccccggccgcggagccggctcactgcactacccccgcccccttctttcctccagacgccgaagtcgcgggcgctcatggcgggcctggagccgggtcccaatgataagaagtcagaactgctgccagctgggtggaacaacaataaagacctgtatgtcctccggtatgagtataaggatgggtccagaaagctccttgtgaaagccatcaccgtggagagcagcatgatcctcaatgtgctggaatatggctcacagcaagtggcagacttgaccctgaacttggatgattatatcgatgcagaacacctgggtgacttccacaggacctacaagaacagtgaggagcttcggtctcgtattgtgtctggaatcatcacacctatccatgagcagtgggaaaaggctaatgtaagcagtccccaccgggagttcccccctgctaccgccagagaggtggacccactccggattcctccacaccacccacacaccagtcggcagcctccctggtgtgatcccctgggcccgtttgttgtcgggggagaagacttagacccttttgggcctcggagaggtggcatgattgtggatcccctgagatctggcttcccaagagcacttattgacccttcctcaggcctcccgaaccgacttcctccaggcgctgtgcccccaggagctcgctttgacccctttggacccattgggaccagcccacccggacctaacccagaccatctccccccgccgggctacgatgacatgtacctgtgaaggcctcaagaatgtaacatcccaggcttccctccattctcctggagctgccaccgctgtccccatcagcaaccatgttcttgcaggctgggggcaagggattctgctcatgtgtttgcagaccggctgggatagcctccccaccccttatcagagccaagacacctgctgcagctctccacctagctgcagatagctcccaaagagaaatcagtgtgtctctttcaccatcagctcctcccctttcaccaccagctcctctccacttcccaagggagactccggcaaccttcagcaacatatatcctcgaccagatgcagtgctataagaacagaacgcattttggatgttattattaagaaccaaatgtcaatacagaattcatgttgccggtttcccacttttctttttacattaatgcatagctgcttccatttatgagactttagagtttgagtttctgtagggctgaatgactctttttcctgcccagggcccattcttgcttctcaggcaccttccgtttattaattgccattgctcctgacatcactaagatgggtccccttctggctgcatgaatggaaatgagtgactggaaatcccataggccacaagaatgactttcacaagggcaggaacattgtggaaagactgcatcattctgatgaggcaaaatcctccagctattcctgtctgggccagttttgtaggtccatctgtgcatgggcagcagtagtcaaaaagccaaggaaaaaacagagcagacctgaaggctaatcttatttttgccactaacttagtgaatgaccctaagcaagttccttctcctcttagggccttgtgccaagcctatgaaattggaggtggctttcctgctctaaagcattttgatgtctcattctgtgtttggtaacccctataaactggggcagaggaaaagaatgatggttcaaggccatacttcccttgaaccttgtgtggttcttgcctaactctgtggtttttggaccccatggggcccagacagagcacaggagcatgggctgcctctgagtgtggtgttgaacttcgggaggagcagggagccctgcaccttgtgtcctggcccacctgacctttggtgttctccggatccttttcagcccgaggcctgacagacgcgggcagtgatgagccctgttctggagtggaaagagcacgatagagcaccaggctaagaggcacgagatcaaggcggtagtcacttccgctctgcagctagcatttcaaccatatgtggatcctttcatttctcagctccctggattccttcccctaaattaggacctattatttacctgtaggtaagcaagctactgtagctcttctgaggtatctgccaggctgttttctgtagcctcagattgcctatctgcttagcctgagaacaggtagatgaaaactaaactgatgcctaggcccagggtcagtctcagatggaagctgggcctgggtggggaggctagcatgcgtggctccctgggtatttctgtcagtccccatggcaagcagtgatttagtaaaacaccccagagtcagggaagccaaccaccttgaaacctttagaacatctctgctttggagaaagacccagagatcaggcagaggtgcagattcaatcattactcataacctttgagagatggcaaatgggaggagtgttagtctttgttttggaattggaccattcttgcaaccaaaaggacttagagcagtttgctcataaagacatcctttattataaaaggaagtatttaaaggatgatagagaccatcagatagaagcagggaaggtagataacttttaggaccttgatgtgaggaaaagataaaatttaaacaataaatttgccacttagattttctagcagcaaagtccgaaaagatagttatatacaaaattctgttttctgaaaacaaaattgtgattcaccttcagaattggccattttttttgtgagtttccttgcatcaaggacactgagaaacacagtcattgtcttaggtgttctatgggaggaagtgaatagagcctttaggaacttcctggtcaagcttatggtgcttattttgatctgggccacttccctccttccagtcatgagtaatcatcaaggagcaagttggagtgtttcaggtgtatattttgtagaacccaaaagattggagccttaacaataaacatcagcactaagtgacctgttcctccttttttaaatagcagctttattgagatataatttacatacccataatttacatacctgtttaaagtatacaattcagtggatttagtatgttcacagtgttgcacatccaccaccatttctaattcctgaacattttcaccacctcaaaaagaaaccacacacccattggcatgactccccattcccttgctcccagccccaggcaaccactaacatctgtctctaaagattttttttttttttctggacagttctcataagtggaatcactcagtattatggccttttgtgtctggcttctttcatttcatgtgatgttttcaagattcattcatgctgtagcatgtatccatggtatggatatatcacattttgcttatccttttatcagttgatggacagttgggttgtttctacaaaaaggctattatgagtaatgcagccaagaacatttgtgtaccagtttttgagttttcagttgtttgagtttcagatgttttcagttcatttgggtatataccaaggagtggaattgctggttcacatggtagctctatattctactttgtgaggaattgtcagactgttttccacggaagctgcaccattttacatttccactggtaatttatgagggttccagtttccccacatcttcaccaactcttgttatttttcatgcttatggccatcctagttagcgtgaagtagcatctcattgtggtcttctcttccattttttaaaaaagaattttgacctacaccaagcaaggcagagaccagagtcagtcccccttggggagcaatctgtggttttgataatcaccaccttgggatgaacatggctggtgagctgcagagcagttgatttgacttttggggatggttctaggctggatgtgatacagggcaggttttgtctctagagaaagttctcatgaccttcaggtctaatgagattcagatcatcactttggtttggtttgaaatttctttgtttatccagtgaattacaagtagaataaagatctggttctaaattgtcttttggtggtgaagtgccatagaccatttcggaccatttctatgatgtaccagcagcccccacatcacacctcctcttccttggcttgtctcttccccaattcttagagttagcagtgtttcttactgcattcatctcctcagtcataagtgtctgtcaacctccgttgtgaagtcatgagtctcttgagactgaaactccaagaatgtattgtgctcacagtggcgatggtgttcctgtgctggatggtcagtggttgttgacatgtagttagaaaataggtagcaagttccacgcagcctcactctttggaacctagtttctcctatggcctccctttctactgttgttaataacattctattaatgatccatgcctctcttcacaggaggaatattagaatctatggagcagttagtattctttgtcacctaaatttgtctacttctgtacatttccaataaggcaccaccagggcaagggaagattccccacatgtatatccccagctgtttctgtcataaaacttgcatgtgtataaaccactattgactttttgcaccaaaggagatattcaaggacagacatccaagtccccagccctttattgccctt

SEQ ID NO: 10559 - protein, 233 aa, Homo sapiens; identical to SEQ ID NO: 10553

SEQ ID NO: 10560 - DNA, 574 bp, Homo sapiens
cgccccgccccgtccccgggcgtctccattttggtctcaggtgtggactcggcaagaaccagcgcaagagggaagcagagttatagctaccccggccgcggagccggctcactgcactacccccgcccccttctttcctccagacgccgaagtcgcgggcgctcatggcgggcctggagccgggtcccaatgataagaagtcagaactgctgccagctgggtggaacaacaataaagacctgtatgtcctccggtatgagtataaggatgggtccagaaagctccttgtgaaagccatcaccgtggagagcagcatgatcctcaatgtgctggaatatggctcacagcaagtggcagacttgaccctgaacttggatgattatatcgatgcagaacacctgggtgacttccacaggacctacaagaacagtgaggagcttcggtctcgtattgtgtctggaatcatcacacctatccatgagcagtgggaaaaggctaatgtaagcagtccccaccgggagttcccccctgctaccgccagagaggtggacccactccggattcctccacacca

SEQ ID NO: 10561 - protein, 135 aa, Homo sapiens
MAGLEPGPNDKKSELLPAGWNNNKDLYVLRYEYKDGSRKLLVKAITVESSMILNVLEYGSQQVADLTLNLDDYIDAEHLGDFHRTYKNSEELRSRIVSGIITPIHEQWEKANVSSPHREFPPATAREVDPLRIPP

SEQ ID NO: 10562 - DNA, 632 bp, Homo sapiens
cattttggtctcaggtgtggactcggcaagaaccagcgcaagagggaagcagagttatagctaccccggccgcggagccggctcactgcactacccccgcccccttcgacttcctccaggcgctgtgcccccaggagctcgctttgacccctttggacccattgggaccagcccacccggacctaacccagaccatctccccccgccgggctacgatgacatgtacctgtgaaggcctcaagaatgtaacatcccaggcttccctccattctcctggagctgccaccgctgtccccatcagcaaccatgttcttgcaggctgggggcaagggattctgctcatgtgtttgcagaccggctgggatagcctccccaccccttatcagagccaagacacctgctgcagctctccacctagctgcagatagctcccaaagagaaatcagtgtgtctctttcaccatcagctcctcccctttcaccaccagctcctctccacttcccaagggagactccggcaaccttcagcaacatatatcctcgaccagatgcagtgctataagaacagaacgcattttggatgttattattaagaaccaaatgtcaatacagaattcatgttgccggtttccc

SEQ ID NO: 10563 - protein, 84 aa, Homo sapiens
MFLQAGGKGFCSCVCRPAGIASPPLIRAKTPAAALHLAADSSQREISVSLSPSAPPLSPPAPLHFPRETPATFSNIYPRPDAVL

SEQ ID NO: 10564 - DNA, 2480 bp, Homo sapiens
cattttggtctcaggtgtggactcggcaagaaccagcgcaagagggaagcagagttatagctaccccggccgcggagccggctcactgcactacccccgcccccttcgacttcctccaggcgctgtgcccccaggagctcgctttgacccctttggacccattgggaccagcccacccggacctaacccagaccatctccccccgccgggctacgatgacatgtacctgtgaaggcctcaagaatgtaacatcccaggcttccctccattctcctggagctgccaccgctgtccccatcagcaaccatgttcttgcaggctgggggcaagggattctgctcatgtgtttgcagaccggctgggatagcctccccaccccttatcagagccaagacacctgctgcagctctccacctagctgcagatagctcccaaagagaaatcagtgtgtctctttcaccatcagctcctcccctttcaccaccagctcctctccacttcccaagggagactccggcaaccttcagcaacatatatcctcgaccagatgcagtgctataagaacagaacgcattttggatgttattattaagaaccaaatgtcaatacagaattcatgttgccggtttcccacttttctttttacattaatgcatagctgcttccatttatgagactttagagtttgagtttctgtagggctgaatgactctttttcctgcccagggcccattcttgcttctcaggcaccttccgtttattaattgccattgctcctgacatcactaagatgggtccccttctggctgcatgaatggaaatgagtgactggaaatcccataggccacaagaatgactttcacaagggcaggaacattgtggaaagactgcatcattctgatgaggcaaaatcctccagctattcctgtctgggccagttttgtaggtccatctgtgcatgggcagcagtagtcaaaaagccaaggaaaaaacagagcagacctgaaggctaatcttatttttgccactaacttagtgaatgaccctaagcaagttccttctcctcttagggccttgtgccaagcctatgaaattggaggtggctttcctgctctaaagcattttgatgtctcattctgtgtttggtaacccctataaactggggcagaggaaaagaatgatggttcaaggccatacttcccttgaaccttgtgtggttcttgcctaactctgtggtttttggaccccatggggcccagacagagcacaggagcatgggctgcctctgagtgtggtgttgaacttcgggaggagcagggagccctgcaccttgtgtcctggcccacctgacctttggtgttctccggatccttttcagcccgaggcctgacagacgcgggcagtgatgagccctgttctggagtggaaagagcacgatagagcaccaggctaagaggcacgagatcaaggcggtagtcacttccgctctgcagctagcatttcaaccatatgtggatcctttcatttctcagctccctggattccttcccctaaattaggacctattatttacctgtaggtaagcaagctactgtagctcttctgaggtatctgccaggctgttttctgtagcctcagattgcctatctgcttagcctgagaacaggtagatgaaaactaaactgatgcctaggcccagggtcagtctcagatggaagctgggcctgggtggggaggctagcatgcgtggctccctgggtatttctgtcagtccccatggcaagcagtgatttagtaaaacaccccagagtcagggaagccaaccaccttgaaacctttagaacatctctgctttggagaaagacccagagatcaggcagaggtgcagattcaatcattactcataacctttgagagatggcaaatgggaggagtgttagtctttgttttggaattggaccattcttgcaaccaaaaggacttagagcagtttgctcataaagacatcctttattataaaaggaagtatttaaaggatgatagagaccatcagatagaagcagggaaggtagataacttttaggaccttgatgtgaggaaaagataaaatttaaacaataaatttgccacttagattttctagcagcaaagtccgaaaagatagttatatacaaaattctgttttctgaaaacaaaattgtgattcaccttcagaattggccattttttttgtgagtttccttgcatcaaggacactgagaaacacagtcattgtcttaggtgttctatgggaggaagtgaatagagcctttaggaacttcctggtcaagcttatggtgcttattttgatctgggccacttccctccttccagtcatgagtaatcatcaaggagcaagttggagtgtttcaggtgtatattttgtagaacccaaaagattggagccttaacaataaacatcagcactaagtgacctgttc

SEQ ID NO: 10565 - protein, 84 aa, Homo sapiens; identical to SEQ ID NO: 10563

SEQ ID NO: 10566 - DNA, 4146 bp, Homo sapiens
cattttggtctcaggtgtggactcggcaagaaccagcgcaagagggaagcagagttatagctaccccggccgcggagccggctcactgcactacccccgcccccttcgacttcctccaggcgctgtgcccccaggagctcgctttgacccctttggacccattgggaccagcccacccggacctaacccagaccatctccccccgccgggctacgatgacatgtacctgtgaaggcctcaagaatgtaacatcccaggcttccctccattctcctggagctgccaccgctgtccccatcagcaaccatgttcttgcaggctgggggcaagggattctgctcatgtgtttgcagaccggctgggatagcctccccaccccttatcagagccaagacacctgctgcagctctccacctagctgcagatagctcccaaagagaaatcagtgtgtctctttcaccatcagctcctcccctttcaccaccagctcctctccacttcccaagggagactccggcaaccttcagcaacatatatcctcgaccagatgcagtgctataagaacagaacgcattttggatgttattattaagaaccaaatgtcaatacagaattcatgttgccggtttcccacttttctttttacattaatgcatagctgcttccatttatgagactttagagtttgagtttctgtagggctgaatgactctttttcctgcccagggcccattcttgcttctcaggcaccttccgtttattaattgccattgctcctgacatcactaagatgggtccccttctggctgcatgaatggaaatgagtgactggaaatcccataggccacaagaatgactttcacaagggcaggaacattgtggaaagactgcatcattctgatgaggcaaaatcctccagctattcctgtctgggccagttttgtaggtccatctgtgcatgggcagcagtagtcaaaaagccaaggaaaaaacagagcagacctgaaggctaatcttatttttgccactaacttagtgaatgaccctaagcaagttccttctcctcttagggccttgtgccaagcctatgaaattggaggtggctttcctgctctaaagcattttgatgtctcattctgtgtttggtaacccctataaactggggcagaggaaaagaatgatggttcaaggccatacttcccttgaaccttgtgtggttcttgcctaactctgtggtttttggaccccatggggcccagacagagcacaggagcatgggctgcctctgagtgtggtgttgaacttcgggaggagcagggagccctgcaccttgtgtcctggcccacctgacctttggtgttctccggatccttttcagcccgaggcctgacagacgcgggcagtgatgagccctgttctggagtggaaagagcacgatagagcaccaggctaagaggcacgagatcaaggcggtagtcacttccgctctgcagctagcatttcaaccatatgtggatcctttcatttctcagctccctggattccttcccctaaattaggacctattatttacctgtaggtaagcaagctactgtagctcttctgaggtatctgccaggctgttttctgtagcctcagattgcctatctgcttagcctgagaacaggtagatgaaaactaaactgatgcctaggcccagggtcagtctcagatggaagctgggcctgggtggggaggctagcatgcgtggctccctgggtatttctgtcagtccccatggcaagcagtgatttagtaaaacaccccagagtcagggaagccaaccaccttgaaacctttagaacatctctgctttggagaaagacccagagatcaggcagaggtgcagattcaatcattactcataacctttgagagatggcaaatgggaggagtgttagtctttgttttggaattggaccattcttgcaaccaaaaggacttagagcagtttgctcataaagacatcctttattataaaaggaagtatttaaaggatgatagagaccatcagatagaagcagggaaggtagataacttttaggaccttgatgtgaggaaaagataaaatttaaacaataaatttgccacttagattttctagcagcaaagtccgaaaagatagttatatacaaaattctgttttctgaaaacaaaattgtgattcaccttcagaattggccattttttttgtgagtttccttgcatcaaggacactgagaaacacagtcattgtcttaggtgttctatgggaggaagtgaatagagcctttaggaacttcctggtcaagcttatggtgcttattttgatctgggccacttccctccttccagtcatgagtaatcatcaaggagcaagttggagtgtttcaggtgtatattttgtagaacccaaaagattggagccttaacaataaacatcagcactaagtgacctgttcctccttttttaaatagcagctttattgagatataatttacatacccataatttacatacctgtttaaagtatacaattcagtggatttagtatgttcacagtgttgcacatccaccaccatttctaattcctgaacattttcaccacctcaaaaagaaaccacacacccattggcatgactccccattcccttgctcccagccccaggcaaccactaacatctgtctctaaagattttttttttttttctggacagttctcataagtggaatcactcagtattatggccttttgtgtctggcttctttcatttcatgtgatgttttcaagattcattcatgctgtagcatgtatccatggtatggatatatcacattttgcttatccttttatcagttgatggacagttgggttgtttctacaaaaaggctattatgagtaatgcagccaagaacatttgtgtaccagtttttgagttttcagttgtttgagtttcagatgttttcagttcatttgggtatataccaaggagtggaattgctggttcacatggtagctctatattctactttgtgaggaattgtcagactgttttccacggaagctgcaccattttacatttccactggtaatttatgagggttccagtttccccacatcttcaccaactcttgttatttttcatgcttatggccatcctagttagcgtgaagtagcatctcattgtggtcttctcttccattttttaaaaaagaattttgacctacaccaagcaaggcagagaccagagtcagtcccccttggggagcaatctgtggttttgataatcaccaccttgggatgaacatggctggtgagctgcagagcagttgatttgacttttggggatggttctaggctggatgtgatacagggcaggttttgtctctagagaaagttctcatgaccttcaggtctaatgagattcagatcatcactttggtttggtttgaaatttctttgtttatccagtgaattacaagtagaataaagatctggttctaaattgtcttttggtggtgaagtgccatagaccatttcggaccatttctatgatgtaccagcagcccccacatcacacctcctcttccttggcttgtctcttccccaattcttagagttagcagtgtttcttactgcattcatctcctcagtcataagtgtctgtcaacctccgttgtgaagtcatgagtctcttgagactgaaactccaagaatgtattgtgctcacagtggcgatggtgttcctgtgctggatggtcagtggttgttgacatgtagttagaaaataggtagcaagttccacgcagcctcactctttggaacctagtttctcctatggcctccctttctactgttgttaataacattctattaatgatccatgcctctcttcacaggaggaatattagaatctatggagcagttagtattctttgtcacctaaatttgtctacttctgtacatttccaataaggcaccaccagggcaagggaagattccccacatgtatatccccagctgtttctgtcataaaacttgcatgtgtataaaccactattgactttttgcaccaaaggagatattcaaggacagacatccaagtccccagccctttattgccctt

SEQ ID NO: 10567 - protein, 84 aa, Homo sapiens; identical to SEQ ID NO: 10563

SEQ ID NO: 10568 - DNA, 337 bp, Homo sapiens
acctgtatgtcctccggtatgagtataaggatgggtccagaaagctccttgtgaaagccatcaccgtggagagcagcatgatcctcaatgtgctggaatatggctcacagcaagtggcagacttgaccctgaacttggatgattatatcgatgcagaacacctgggtgacttccacaggacctacaagaacagtgaggagcttcggtctcgtattgtgtctggaatcatcacacctatccatgagcagtgggaaaaggctaatgtaagcagtccccaccgggagttcccccctgctaccgccagagaggtggacccactccggattcctccacacca

SEQ ID NO: 10569 - protein, 85 aa, Homo sapiens
MILNVLEYGSQQVADLTLNLDDYIDAEHLGDFHRTYKNSEELRSRIVSGIITPIHEQWEKANVSSPHREFPPATAREVDPLRIPP

SEQ ID NO: 10570 - DNA, 1139 bp, Homo sapiens
aatccaggccctgtgcccctacaccctcacctctttctaatggggtggtaaacaaggaggggcaactcagatgcctaagaagcttgggcccaaatctcagagacagcgtggggctgttgcccccctcacccaggtccagcaggcggcctgttcccccacttataaacaggccaagcgcaatgccaggagctatcagggccgccgccgccgccgtcgttgcagccagaataccacttccagggttcctagccaactgcaagcagttgactcttcatctgcttcctgcaggacctacaagaacagtgaggagcttcggtctcgtattgtgtctggaatcatcacacctatccatgagcagtgggaaaaggctaatgtaagcagtccccaccgggagttcccccctgctaccgccagagaggtggacccactccggattcctccacaccacccacacaccagtcggcagcctccctggtgtgatcccctgggcccgtttgttgtcgggggagaagacttagacccttttgggcctcggagaggtggcatgattgtggatcccctgagatctggcttcccaagagcacttattgacccttcctcaggcctcccgaaccgacttcctccaggcgctgtgcccccaggagctcgctttgacccctttggacccattgggaccagcccacccggacctaacccagaccatctccccccgccgggctacgatgacatgtacctgtgaaggcctcaagaatgtaacatcccaggcttccctccattctcctggagctgccaccgctgtccccatcagcaaccatgttcttgcaggctgggggcaagggattctgctcatgtgtttgcagaccggctgggatagcctccccaccccttatcagagccaagacacctgctgcagctctccacctagctgcagatagctcccaaagagaaatcagtgtgtctctttcaccatcagctcctcccctttcaccaccagctcctctccacttcccaagggagactccggcaaccttcagcaacatatatcctcgaccagatgcagtgctataagaacagaacgcattttggatgttattattaagaaccaaatgtcaatacagaattcatgttgccggtttccc

SEQ ID NO: 10571 - protein, 222 aa, Homo sapiens
MPKKLGPKSQRQRGAVAPLTQVQQAACSPTYKQAKRNARSYQGRRRRRRCSQNTTSRVPSQLQAVDSSSASCRTYKNSEELRSRIVSGIITPIHEQWEKANVSSPHREFPPATAREVDPLRIPPHHPHTSRQPPWCDPLGPFVVGGEDLDPFGPRRGGMIVDPLRSGFPRALIDPSSGLPNRLPPGAVPPGARFDPFGPIGTSPPGPNPDHLPPPGYDDMYL

SEQ ID NO: 10572 - DNA, 2987 bp, Homo sapiens
aatccaggccctgtgcccctacaccctcacctctttctaatggggtggtaaacaaggaggggcaactcagatgcctaagaagcttgggcccaaatctcagagacagcgtggggctgttgcccccctcacccaggtccagcaggcggcctgttcccccacttataaacaggccaagcgcaatgccaggagctatcagggccgccgccgccgccgtcgttgcagccagaataccacttccagggttcctagccaactgcaagcagttgactcttcatctgcttcctgcaggacctacaagaacagtgaggagcttcggtctcgtattgtgtctggaatcatcacacctatccatgagcagtgggaaaaggctaatgtaagcagtccccaccgggagttcccccctgctaccgccagagaggtggacccactccggattcctccacaccacccacacaccagtcggcagcctccctggtgtgatcccctgggcccgtttgttgtcgggggagaagacttagacccttttgggcctcggagaggtggcatgattgtggatcccctgagatctggcttcccaagagcacttattgacccttcctcaggcctcccgaaccgacttcctccaggcgctgtgcccccaggagctcgctttgacccctttggacccattgggaccagcccacccggacctaacccagaccatctccccccgccgggctacgatgacatgtacctgtgaaggcctcaagaatgtaacatcccaggcttccctccattctcctggagctgccaccgctgtccccatcagcaaccatgttcttgcaggctgggggcaagggattctgctcatgtgtttgcagaccggctgggatagcctccccaccccttatcagagccaagacacctgctgcagctctccacctagctgcagatagctcccaaagagaaatcagtgtgtctctttcaccatcagctcctcccctttcaccaccagctcctctccacttcccaagggagactccggcaaccttcagcaacatatatcctcgaccagatgcagtgctataagaacagaacgcattttggatgttattattaagaaccaaatgtcaatacagaattcatgttgccggtttcccacttttctttttacattaatgcatagctgcttccatttatgagactttagagtttgagtttctgtagggctgaatgactctttttcctgcccagggcccattcttgcttctcaggcaccttccgtttattaattgccattgctcctgacatcactaagatgggtccccttctggctgcatgaatggaaatgagtgactggaaatcccataggccacaagaatgactttcacaagggcaggaacattgtggaaagactgcatcattctgatgaggcaaaatcctccagctattcctgtctgggccagttttgtaggtccatctgtgcatgggcagcagtagtcaaaaagccaaggaaaaaacagagcagacctgaaggctaatcttatttttgccactaacttagtgaatgaccctaagcaagttccttctcctcttagggccttgtgccaagcctatgaaattggaggtggctttcctgctctaaagcattttgatgtctcattctgtgtttggtaacccctataaactggggcagaggaaaagaatgatggttcaaggccatacttcccttgaaccttgtgtggttcttgcctaactctgtggtttttggaccccatggggcccagacagagcacaggagcatgggctgcctctgagtgtggtgttgaacttcgggaggagcagggagccctgcaccttgtgtcctggcccacctgacctttggtgttctccggatccttttcagcccgaggcctgacagacgcgggcagtgatgagccctgttctggagtggaaagagcacgatagagcaccaggctaagaggcacgagatcaaggcggtagtcacttccgctctgcagctagcatttcaaccatatgtggatcctttcatttctcagctccctggattccttcccctaaattaggacctattatttacctgtaggtaagcaagctactgtagctcttctgaggtatctgccaggctgttttctgtagcctcagattgcctatctgcttagcctgagaacaggtagatgaaaactaaactgatgcctaggcccagggtcagtctcagatggaagctgggcctgggtggggaggctagcatgcgtggctccctgggtatttctgtcagtccccatggcaagcagtgatttagtaaaacaccccagagtcagggaagccaaccaccttgaaacctttagaacatctctgctttggagaaagacccagagatcaggcagaggtgcagattcaatcattactcataacctttgagagatggcaaatgggaggagtgttagtctttgttttggaattggaccattcttgcaaccaaaaggacttagagcagtttgctcataaagacatcctttattataaaaggaagtatttaaaggatgatagagaccatcagatagaagcagggaaggtagataacttttaggaccttgatgtgaggaaaagataaaatttaaacaataaatttgccacttagattttctagcagcaaagtccgaaaagatagttatatacaaaattctgttttctgaaaacaaaattgtgattcaccttcagaattggccattttttttgtgagtttccttgcatcaaggacactgagaaacacagtcattgtcttaggtgttctatgggaggaagtgaatagagcctttaggaacttcctggtcaagcttatggtgcttattttgatctgggccacttccctccttccagtcatgagtaatcatcaaggagcaagttggagtgtttcaggtgtatattttgtagaacccaaaagattggagccttaacaataaacatcagcactaagtgacctgttc

SEQ ID NO: 10573 - protein, 222 aa, Homo sapiens; identical to SEQ ID NO: 10571

SEQ ID NO: 10574 - DNA, 4653 bp, Homo sapiens
aatccaggccctgtgcccctacaccctcacctctttctaatggggtggtaaacaaggaggggcaactcagatgcctaagaagcttgggcccaaatctcagagacagcgtggggctgttgcccccctcacccaggtccagcaggcggcctgttcccccacttataaacaggccaagcgcaatgccaggagctatcagggccgccgccgccgccgtcgttgcagccagaataccacttccagggttcctagccaactgcaagcagttgactcttcatctgcttcctgcaggacctacaagaacagtgaggagcttcggtctcgtattgtgtctggaatcatcacacctatccatgagcagtgggaaaaggctaatgtaagcagtccccaccgggagttcccccctgctaccgccagagaggtggacccactccggattcctccacaccacccacacaccagtcggcagcctccctggtgtgatcccctgggcccgtttgttgtcgggggagaagacttagacccttttgggcctcggagaggtggcatgattgtggatcccctgagatctggcttcccaagagcacttattgacccttcctcaggcctcccgaaccgacttcctccaggcgctgtgcccccaggagctcgctttgacccctttggacccattgggaccagcccacccggacctaacccagaccatctccccccgccgggctacgatgacatgtacctgtgaaggcctcaagaatgtaacatcccaggcttccctccattctcctggagctgccaccgctgtccccatcagcaaccatgttcttgcaggctgggggcaagggattctgctcatgtgtttgcagaccggctgggatagcctccccaccccttatcagagccaagacacctgctgcagctctccacctagctgcagatagctcccaaagagaaatcagtgtgtctctttcaccatcagctcctcccctttcaccaccagctcctctccacttcccaagggagactccggcaaccttcagcaacatatatcctcgaccagatgcagtgctataagaacagaacgcattttggatgttattattaagaaccaaatgtcaatacagaattcatgttgccggtttcccacttttctttttacattaatgcatagctgcttccatttatgagactttagagtttgagtttctgtagggctgaatgactctttttcctgcccagggcccattcttgcttctcaggcaccttccgtttattaattgccattgctcctgacatcactaagatgggtccccttctggctgcatgaatggaaatgagtgactggaaatcccataggccacaagaatgactttcacaagggcaggaacattgtggaaagactgcatcattctgatgaggcaaaatcctccagctattcctgtctgggccagttttgtaggtccatctgtgcatgggcagcagtagtcaaaaagccaaggaaaaaacagagcagacctgaaggctaatcttatttttgccactaacttagtgaatgaccctaagcaagttccttctcctcttagggccttgtgccaagcctatgaaattggaggtggctttcctgctctaaagcattttgatgtctcattctgtgtttggtaacccctataaactggggcagaggaaaagaatgatggttcaaggccatacttcccttgaaccttgtgtggttcttgcctaactctgtggtttttggaccccatggggcccagacagagcacaggagcatgggctgcctctgagtgtggtgttgaacttcgggaggagcagggagccctgcaccttgtgtcctggcccacctgacctttggtgttctccggatccttttcagcccgaggcctgacagacgcgggcagtgatgagccctgttctggagtggaaagagcacgatagagcaccaggctaagaggcacgagatcaaggcggtagtcacttccgctctgcagctagcatttcaaccatatgtggatcctttcatttctcagctccctggattccttcccctaaattaggacctattatttacctgtaggtaagcaagctactgtagctcttctgaggtatctgccaggctgttttctgtagcctcagattgcctatctgcttagcctgagaacaggtagatgaaaactaaactgatgcctaggcccagggtcagtctcagatggaagctgggcctgggtggggaggctagcatgcgtggctccctgggtatttctgtcagtccccatggcaagcagtgatttagtaaaacaccccagagtcagggaagccaaccaccttgaaacctttagaacatctctgctttggagaaagacccagagatcaggcagaggtgcagattcaatcattactcataacctttgagagatggcaaatgggaggagtgttagtctttgttttggaattggaccattcttgcaaccaaaaggacttagagcagtttgctcataaagacatcctttattataaaaggaagtatttaaaggatgatagagaccatcagatagaagcagggaaggtagataacttttaggaccttgatgtgaggaaaagataaaatttaaacaataaatttgccacttagattttctagcagcaaagtccgaaaagatagttatatacaaaattctgttttctgaaaacaaaattgtgattcaccttcagaattggccattttttttgtgagtttccttgcatcaaggacactgagaaacacagtcattgtcttaggtgttctatgggaggaagtgaatagagcctttaggaacttcctggtcaagcttatggtgcttattttgatctgggccacttccctccttccagtcatgagtaatcatcaaggagcaagttggagtgtttcaggtgtatattttgtagaacccaaaagattggagccttaacaataaacatcagcactaagtgacctgttcctccttttttaaatagcagctttattgagatataatttacatacccataatttacatacctgtttaaagtatacaattcagtggatttagtatgttcacagtgttgcacatccaccaccatttctaattcctgaacattttcaccacctcaaaaagaaaccacacacccattggcatgactccccattcccttgctcccagccccaggcaaccactaacatctgtctctaaagattttttttttttttctggacagttctcataagtggaatcactcagtattatggccttttgtgtctggcttctttcatttcatgtgatgttttcaagattcattcatgctgtagcatgtatccatggtatggatatatcacattttgcttatccttttatcagttgatggacagttgggttgtttctacaaaaaggctattatgagtaatgcagccaagaacatttgtgtaccagtttttgagttttcagttgtttgagtttcagatgttttcagttcatttgggtatataccaaggagtggaattgctggttcacatggtagctctatattctactttgtgaggaattgtcagactgttttccacggaagctgcaccattttacatttccactggtaatttatgagggttccagtttccccacatcttcaccaactcttgttatttttcatgcttatggccatcctagttagcgtgaagtagcatctcattgtggtcttctcttccattttttaaaaaagaattttgacctacaccaagcaaggcagagaccagagtcagtcccccttggggagcaatctgtggttttgataatcaccaccttgggatgaacatggctggtgagctgcagagcagttgatttgacttttggggatggttctaggctggatgtgatacagggcaggttttgtctctagagaaagttctcatgaccttcaggtctaatgagattcagatcatcactttggtttggtttgaaatttctttgtttatccagtgaattacaagtagaataaagatctggttctaaattgtcttttggtggtgaagtgccatagaccatttcggaccatttctatgatgtaccagcagcccccacatcacacctcctcttccttggcttgtctcttccccaattcttagagttagcagtgtttcttactgcattcatctcctcagtcataagtgtctgtcaacctccgttgtgaagtcatgagtctcttgagactgaaactccaagaatgtattgtgctcacagtggcgatggtgttcctgtgctggatggtcagtggttgttgacatgtagttagaaaataggtagcaagttccacgcagcctcactctttggaacctagtttctcctatggcctccctttctactgttgttaataacattctattaatgatccatgcctctcttcacaggaggaatattagaatctatggagcagttagtattctttgtcacctaaatttgtctacttctgtacatttccaataaggcaccaccagggcaagggaagattccccacatgtatatccccagctgtttctgtcataaaacttgcatgtgtataaaccactattgactttttgcaccaaaggagatattcaaggacagacatccaagtccccagccctttattgccctt

SEQ ID NO: 10575 - protein, 222 aa, Homo sapiens; identical to SEQ ID NO: 10571

SEQ ID NO: 10576 - DNA, 2441 bp, Homo sapiens
cagatgcctaagaagcttgggcccaaatctcagagacagcgtggggctgttgcccccctcacccaggtccagcaggcggcctgttcccccacttataaacaggccaagcgcaatgccaggagctatcagggccgccgccgccgccgtcgttgcagccagaataccacttccagggttcctagccaactgcaagcagttgactcttcatctgcttcctgcaggacctacaagaacagtgaggagcttcggtctcgtattgtgtctggaatcatcacacctatccatgagcagtgggaaaaggctaatgtaagcagtccccaccgggagttcccccctgctaccgccagagaggtggacccactccggattcctccactagctgcagatagctcccaaagagaaatcagtgtgtctctttcaccatcagctcctcccctttcaccaccagctcctctccacttcccaagggagactccggcaaccttcagcaacatatatcctcgaccagatgcagtgctataagaacagaacgcattttggatgttattattaagaaccaaatgtcaatacagaattcatgttgccggtttcccacttttctttttacattaatgcatagctgcttccatttatgagactttagagtttgagtttctgtagggctgaatgactctttttcctgcccagggcccattcttgcttctcaggcaccttccgtttattaattgccattgctcctgacatcactaagatgggtccccttctggctgcatgaatggaaatgagtgactggaaatcccataggccacaagaatgactttcacaagggcaggaacattgtggaaagactgcatcattctgatgaggcaaaatcctccagctattcctgtctgggccagttttgtaggtccatctgtgcatgggcagcagtagtcaaaaagccaaggaaaaaacagagcagacctgaaggctaatcttatttttgccactaacttagtgaatgaccctaagcaagttccttctcctcttagggccttgtgccaagcctatgaaattggaggtggctttcctgctctaaagcattttgatgtctcattctgtgtttggtaacccctataaactggggcagaggaaaagaatgatggttcaaggccatacttcccttgaaccttgtgtggttcttgcctaactctgtggtttttggaccccatggggcccagacagagcacaggagcatgggctgcctctgagtgtggtgttgaacttcgggaggagcagggagccctgcaccttgtgtcctggcccacctgacctttggtgttctccggatccttttcagcccgaggcctgacagacgcgggcagtgatgagccctgttctggagtggaaagagcacgatagagcaccaggctaagaggcacgagatcaaggcggtagtcacttccgctctgcagctagcatttcaaccatatgtggatcctttcatttctcagctccctggattccttcccctaaattaggacctattatttacctgtaggtaagcaagctactgtagctcttctgaggtatctgccaggctgttttctgtagcctcagattgcctatctgcttagcctgagaacaggtagatgaaaactaaactgatgcctaggcccagggtcagtctcagatggaagctgggcctgggtggggaggctagcatgcgtggctccctgggtatttctgtcagtccccatggcaagcagtgatttagtaaaacaccccagagtcagggaagccaaccaccttgaaacctttagaacatctctgctttggagaaagacccagagatcaggcagaggtgcagattcaatcattactcataacctttgagagatggcaaatgggaggagtgttagtctttgttttggaattggaccattcttgcaaccaaaaggacttagagcagtttgctcataaagacatcctttattataaaaggaagtatttaaaggatgatagagaccatcagatagaagcagggaaggtagataacttttaggaccttgatgtgaggaaaagataaaatttaaacaataaatttgccacttagattttctagcagcaaagtccgaaaagatagttatatacaaaattctgttttctgaaaacaaaattgtgattcaccttcagaattggccattttttttgtgagtttccttgcatcaaggacactgagaaacacagtcattgtcttaggtgttctatgggaggaagtgaatagagcctttaggaacttcctggtcaagcttatggtgcttattttgatctgggccacttccctccttccagtcatgagtaatcatcaaggagcaagttggagtgtttcaggtgtatattttgtagaacccaaaagattggagccttaacaataaacatcagcactaagtgacctgttc

SEQ ID NO: 10577 - protein, 172 aa, Homo sapiens
MPKKLGPKSQRQRGAVAPLTQVQQAACSPTYKQAKRNARSYQGRRRRRRCSQNTTSRVPSQLQAVDSSSASCRTYKNSEELRSRIVSGIITPIHEQWEKANVSSPHREFPPATAREVDPLRIPPLAADSSQREISVSLSPSAPPLSPPAPLHFPRETPATFSNIYPRPDAVL

SEQ ID NO: 10578 - DNA, 4107 bp, Homo sapiens
cagatgcctaagaagcttgggcccaaatctcagagacagcgtggggctgttgcccccctcacccaggtccagcaggcggcctgttcccccacttataaacaggccaagcgcaatgccaggagctatcagggccgccgccgccgccgtcgttgcagccagaataccacttccagggttcctagccaactgcaagcagttgactcttcatctgcttcctgcaggacctacaagaacagtgaggagcttcggtctcgtattgtgtctggaatcatcacacctatccatgagcagtgggaaaaggctaatgtaagcagtccccaccgggagttcccccctgctaccgccagagaggtggacccactccggattcctccactagctgcagatagctcccaaagagaaatcagtgtgtctctttcaccatcagctcctcccctttcaccaccagctcctctccacttcccaagggagactccggcaaccttcagcaacatatatcctcgaccagatgcagtgctataagaacagaacgcattttggatgttattattaagaaccaaatgtcaatacagaattcatgttgccggtttcccacttttctttttacattaatgcatagctgcttccatttatgagactttagagtttgagtttctgtagggctgaatgactctttttcctgcccagggcccattcttgcttctcaggcaccttccgtttattaattgccattgctcctgacatcactaagatgggtccccttctggctgcatgaatggaaatgagtgactggaaatcccataggccacaagaatgactttcacaagggcaggaacattgtggaaagactgcatcattctgatgaggcaaaatcctccagctattcctgtctgggccagttttgtaggtccatctgtgcatgggcagcagtagtcaaaaagccaaggaaaaaacagagcagacctgaaggctaatcttatttttgccactaacttagtgaatgaccctaagcaagttccttctcctcttagggccttgtgccaagcctatgaaattggaggtggctttcctgctctaaagcattttgatgtctcattctgtgtttggtaacccctataaactggggcagaggaaaagaatgatggttcaaggccatacttcccttgaaccttgtgtggttcttgcctaactctgtggtttttggaccccatggggcccagacagagcacaggagcatgggctgcctctgagtgtggtgttgaacttcgggaggagcagggagccctgcaccttgtgtcctggcccacctgacctttggtgttctccggatccttttcagcccgaggcctgacagacgcgggcagtgatgagccctgttctggagtggaaagagcacgatagagcaccaggctaagaggcacgagatcaaggcggtagtcacttccgctctgcagctagcatttcaaccatatgtggatcctttcatttctcagctccctggattccttcccctaaattaggacctattatttacctgtaggtaagcaagctactgtagctcttctgaggtatctgccaggctgttttctgtagcctcagattgcctatctgcttagcctgagaacaggtagatgaaaactaaactgatgcctaggcccagggtcagtctcagatggaagctgggcctgggtggggaggctagcatgcgtggctccctgggtatttctgtcagtccccatggcaagcagtgatttagtaaaacaccccagagtcagggaagccaaccaccttgaaacctttagaacatctctgctttggagaaagacccagagatcaggcagaggtgcagattcaatcattactcataacctttgagagatggcaaatgggaggagtgttagtctttgttttggaattggaccattcttgcaaccaaaaggacttagagcagtttgctcataaagacatcctttattataaaaggaagtatttaaaggatgatagagaccatcagatagaagcagggaaggtagataacttttaggaccttgatgtgaggaaaagataaaatttaaacaataaatttgccacttagattttctagcagcaaagtccgaaaagatagttatatacaaaattctgttttctgaaaacaaaattgtgattcaccttcagaattggccattttttttgtgagtttccttgcatcaaggacactgagaaacacagtcattgtcttaggtgttctatgggaggaagtgaatagagcctttaggaacttcctggtcaagcttatggtgcttattttgatctgggccacttccctccttccagtcatgagtaatcatcaaggagcaagttggagtgtttcaggtgtatattttgtagaacccaaaagattggagccttaacaataaacatcagcactaagtgacctgttcctccttttttaaatagcagctttattgagatataatttacatacccataatttacatacctgtttaaagtatacaattcagtggatttagtatgttcacagtgttgcacatccaccaccatttctaattcctgaacattttcaccacctcaaaaagaaaccacacacccattggcatgactccccattcccttgctcccagccccaggcaaccactaacatctgtctctaaagattttttttttttttctggacagttctcataagtggaatcactcagtattatggccttttgtgtctggcttctttcatttcatgtgatgttttcaagattcattcatgctgtagcatgtatccatggtatggatatatcacattttgcttatccttttatcagttgatggacagttgggttgtttctacaaaaaggctattatgagtaatgcagccaagaacatttgtgtaccagtttttgagttttcagttgtttgagtttcagatgttttcagttcatttgggtatataccaaggagtggaattgctggttcacatggtagctctatattctactttgtgaggaattgtcagactgttttccacggaagctgcaccattttacatttccactggtaatttatgagggttccagtttccccacatcttcaccaactcttgttatttttcatgcttatggccatcctagttagcgtgaagtagcatctcattgtggtcttctcttccattttttaaaaaagaattttgacctacaccaagcaaggcagagaccagagtcagtcccccttggggagcaatctgtggttttgataatcaccaccttgggatgaacatggctggtgagctgcagagcagttgatttgacttttggggatggttctaggctggatgtgatacagggcaggttttgtctctagagaaagttctcatgaccttcaggtctaatgagattcagatcatcactttggtttggtttgaaatttctttgtttatccagtgaattacaagtagaataaagatctggttctaaattgtcttttggtggtgaagtgccatagaccatttcggaccatttctatgatgtaccagcagcccccacatcacacctcctcttccttggcttgtctcttccccaattcttagagttagcagtgtttcttactgcattcatctcctcagtcataagtgtctgtcaacctccgttgtgaagtcatgagtctcttgagactgaaactccaagaatgtattgtgctcacagtggcgatggtgttcctgtgctggatggtcagtggttgttgacatgtagttagaaaataggtagcaagttccacgcagcctcactctttggaacctagtttctcctatggcctccctttctactgttgttaataacattctattaatgatccatgcctctcttcacaggaggaatattagaatctatggagcagttagtattctttgtcacctaaatttgtctacttctgtacatttccaataaggcaccaccagggcaagggaagattccccacatgtatatccccagctgtttctgtcataaaacttgcatgtgtataaaccactattgactttttgcaccaaaggagatattcaaggacagacatccaagtccccagccctttattgccctt

SEQ ID NO: 10579 - protein, 172 aa, Homo sapiens; identical to SEQ ID NO: 10577

SEQ ID NO: 10580 - DNA, 4067 bp, Homo sapiens
cagaatatatactgaaaggaggcttgttcattgcattagtttttaaaaatgatccatagcgtgtgtgtgtgttttctcatctataaaatggagatacacccctctcagaggatggttgtggtgattcagcgaggtcgtggctgtgaaagcccctttagacaatacctgcacagagtcggtgtaaatgtcactcctgttttttctgctccccacccccttaactgatatcagctattttggcttaacagcttctttctcatcttaggcctgcctgaaaacgttatagttccctttctggcaggcggtggtttcaatgagtacgtatactttgaattattataaatagttgagggacaggctgcctaaagtctaattggagagttaacctaatgtctgtgaaactaatgaacaaaacgagatagtgtagatcaggaatgtccagtcttttggcttccctgggccactttggaagaattgctttgggccacacataaaatacactgatactaatgatagctgatgagctaacaacaacaaaaagcaaaaaaaaaaaaaaactcataacattttaagaaagtttacaaatttgtgttgggctgcattcaaaactgtcctgggtcgcatacggcccatgagccatgggtggttggacaagcttggtgcagagcttaggcatttacaggtatatgagatttacctattcactatttccaatcaactcttgtggcctatcgtagtgtcatttaaactgtgtgtcccagcccacactttttgagtcccacatgctttgaggctgatgcagagaagcagcttctctagtgctagtaatgtgggtgacattctcctctgagctctactttgtaattctgtaagtccatgtttttcacattcacagaaaagagtaagtttgcttttcagtcattctttaattatatgcttcagggcaatatttaactgtgcaatctctcaaaacctttaatgtgccaatggcctctgaagctgctagtgtaatatgtggcctttcctacaccttccttcctatggaacacactttggaaagcactttcagttggatttgctctcagtaccatttttggggctgtgaagggggaagagtaagttacaagaactgatctaattagaggctttgaggggaagcaaatgctcatctagtggcctttcttctttgcaaaggtctaagtcaggtcatctgctaagagaaagactgggagtgaagtggacaggtggtttggaggagagaaggcggctccatacagttgtggagaattgggagtcctatgtgcattttgtgtttgtcagccatcctgagtgcattatgcaattttcccctttaatcctaacaaaaactgagcaaggcctatgccttaaccctttaaaaatctaattactacctttgttgaaactaagggtgcttgagtaattcaaaccctggtccatgtgattctgagatatgaaatctaacactgtgtctgacaccgtgtcctgttcattgtatgatgaatcccagcagaacccagcacttaattggcttttcagtgccctttagaactctctcccctgccctcaatagtggatgtatgagtacagatacacatgggagtgaggtgcactaggtaatgcaggcctgaaaattccatcacagaagaagaatctggattgctttgcctgcatcctgccactcacctgccaggctgtgccaaggctgcctcagctgcagacttggaacactcccctccaccactccattgaggctaaaactgaccctgttctattatgtcttccagccttatgaccctgtctctcccaccctaggctgtcctgctttcctcccttcaagcccttgttcagttgaagacaccaaggaggaaaaaggccgagtaacttgcccacattactcaggagcgagggagctagcaataacgtatgaaatatatgactcagggtttgaagtgaattctgctggacctgtaagttccataagggcacgattttccctgtctgggtcaatagatcagcagcaccaaacaatgccaggcgcattgcaaatgctcagtaacagtccaagaagggattcccttcttgctaggggccttgtttctgcttgtgttctgatgccatcctctctcctcagcactgccccccaggtgttgagtaccagctctccagcccaacaggcagaaaatgaagccaaagccagctcttccatcttaatcgacgaatcagagcctaccacaaacatccaaattcggcttgcagacggcgggaggctggtgcagaaatttaaccacagccacaggatcagcgacatccgactcttcatcgtggatgcccggccagccatggctgccaccagctttatcctcatgactactttcccgaacaaagagctggctgatgagagccagaccctgaaggaagccaacctgctcaatgctgtcatcgtgcagcggttaacataaccgcccagccagctgcctggcctccctcctgtgtttcccatggccagtggccatgccccatggggatcgcccctcctgcccccttgtgcacacccagcagtccagtgcaacgtctcctccatagctctgggttcttagatcttggttggacgtttgttttctccttagttgcatttcctgggtttttgtgatgatcaatggactttaatgaaaaaaaaaataaaaacaaccaaaaaaattgaaggaatatcaccagcatgttgtacggaaactctcccactgaagcaggctttaattgctttaaaattatatttatcttggggcctgtgggaggaaacttccttccatcttctctgcataaaaacttgtggcacacaatgcttattcactagtgtgtcccacccgccagccccacagatgactggaggaaggaggggaaatgtgtagaaagaggcttcgccaccacttgttcccacgagaatatgtcacttgcccagataaaactgggcggcagccagagttccctgaagtgggaagtcagagctccatgcacacagtgtcttcagaaggtgaaaataaatatttccctgtgctccttttactcaacccctggggtatctaatcttgccaggtcttggccagttgagattctgttccacctgcctgcctggccctttcctccattaccatccagactgctcgcctcctggggattctcaggggctccattatggcttgatttactccacgtgcagaagtcttgagtggacctaggaggtaggtgggatattttttttcactaggatacagctcatgccaacccatcctaagtgagttcagaatcagggtatcttgccctataagataaacagtcaaaatgccaccgagctgttcactagtgatgtgtggcaaatcaaatcaactgttgaagaaggggtgagttttctgtgctacaagcacctgtcactgttggtacttgcaggaggcttctgctgggtatgttttggaagtgagtgtcactacttggctttgcttagcaggttctgcttcacacttgttctttgacctgctgacttgtgacttgcagaaacataggcagtagtcctagcctggtaaagaccctccaccacccctataagtttgattgctatgcaggtttgggagaggaggcctattgggctcttggatggaaccctttcccgtattaaacaaaccagagacagaatcagtgctgactcaggatctcctggtttggaatcgtaatgtgcctcaatcctctttccaagcaggcctcaccagtctctttctctttcctgcttcacccctgcaatgagccaagaaccaacactacatccacctagaactgcagaagggcttgtggtttcaaccaagacccatcctgagcaagggacttggcttggtgcttttgatcccaaagttcccacaccggcagtggcctgctggggcaatggcatctgtcacggtgttttctccagcaggtggagattatggaacctacatatgggtctggaaaaactgtacactgttgtcaccttgaccattaaaaaccagaatgaggacaatgga

SEQ ID NO: 10581 - protein, 143 aa, Homo sapiens
MPGALQMLSNSPRRDSLLARGLVSACVLMPSSLLSTAPQVLSTSSPAQQAENEAKASSSILIDESEPTTNIQIRLADGGRLVQKFNHSHRISDIRLFIVDARPAMAATSFILMTTFPNKELADESQTLKEANLLNAVIVQRLT

SEQ ID NO: 10582 - DNA, 2513 bp, Homo sapiens
gaacaagaatgaacgccagcctcatttcatgggttttggttctccacaggatctgcctcggtctgtcagacattcctaaggaaaattgtataataactatttcgggaatgcagttatctcatcatggtcagtctttggggaagtgggctgagaaattacatgtgttctattctctattttcattcctattgtgaccttcacaccgactcaaaaccttccttttagatacttctggatataaaaatatatgttaattttggggtttcacactcctgagtgaaaggcagtgtcatcaagtacgtgaatgcccagctcctaaatgtctttctcgttctcctcccacccagtcacgtcctccaggcagtgaccttcctttatttcacattccgcttacttccttgacccctcagcatttcagacctgaaaggacactggtactgttgtccttgtcggggcctgtggctttgcctctcattccctggtgaatgtcaggaaatagagggctgagactaatttttataggttctcaatttttcttgcttggggacaagctgttgacttagctctgaataggagtaataaggaggcagtgggccaggctgcatgacaactggttttcaggcccatataaaaaagtactaactttattatctcaagccatgcctggcctattgcaaagcccagtgtgggtgtcttggggcttgtatttgagattggagcttctctgacctccagtaccctttcctcaggggccacagtgtgtgtcacatgaatggcaaggttttatgctgggggctcagagagaagtggacagcagattgttggccctcccaggaagaaaagtcccaacgagctggtggatgatctctttaaaggtgccaaagagcatggagctgtagctgtggagcgagtgaccaagagccctggagagaccagtaaaccgagaccatttgcaggaggtggctaccgccttggggcagcaccagaggaagagtctgcctatgtggcaggagaaaagaggcacagtccagtgcaacgtctcctccatagctctgggttcttagatcttggttggacgtttgttttctccttagttgcatttcctgggtttttgtgatgatcaatggactttaatgaaaaaaaaaataaaaacaaccaaaaaaattgaaggaatatcaccagcatgttgtacggaaactctcccactgaagcaggctttaattgctttaaaattatatttatcttggggcctgtgggaggaaacttccttccatcttctctgcataaaaacttgtggcacacaatgcttattcactagtgtgtcccacccgccagccccacagatgactggaggaaggaggggaaatgtgtagaaagaggcttcgccaccacttgttcccacgagaatatgtcacttgcccagataaaactgggcggcagccagagttccctgaagtgggaagtcagagctccatgcacacagtgtcttcagaaggtgaaaataaatatttccctgtgctccttttactcaacccctggggtatctaatcttgccaggtcttggccagttgagattctgttccacctgcctgcctggccctttcctccattaccatccagactgctcgcctcctggggattctcaggggctccattatggcttgatttactccacgtgcagaagtcttgagtggacctaggaggtaggtgggatattttttttcactaggatacagctcatgccaacccatcctaagtgagttcagaatcagggtatcttgccctataagataaacagtcaaaatgccaccgagctgttcactagtgatgtgtggcaaatcaaatcaactgttgaagaaggggtgagttttctgtgctacaagcacctgtcactgttggtacttgcaggaggcttctgctgggtatgttttggaagtgagtgtcactacttggctttgcttagcaggttctgcttcacacttgttctttgacctgctgacttgtgacttgcagaaacataggcagtagtcctagcctggtaaagaccctccaccacccctataagtttgattgctatgcaggtttgggagaggaggcctattgggctcttggatggaaccctttcccgtattaaacaaaccagagacagaatcagtgctgactcaggatctcctggtttggaatcgtaatgtgcctcaatcctctttccaagcaggcctcaccagtctctttctctttcctgcttcacccctgcaatgagccaagaaccaacactacatccacctagaactgcagaagggcttgtggtttcaaccaagacccatcctgagcaagggacttggcttggtgcttttgatcccaaagttcccacaccggcagtggcctgctggggcaatggcatctgtcacggtgttttctccagcaggtggagattatggaacctacatatgggtctggaaaaactgtacactgttgtcaccttgaccattaaaaaccagaatgaggacaatgga

SEQ ID NO: 10583 - protein, 114 aa, Homo sapiens
MARFYAGGSERSGQQIVGPPRKKSPNELVDDLFKGAKEHGAVAVERVTKSPGETSKPRPFAGGGYRLGAAPEEESAYVAGEKRHSPVQRLLHSSGFLDLGWTFVFSLVAFPGFL

SEQ ID NO: 10584 - DNA, 1802 bp, Homo sapiens
gactgtcttttatgcggggcgagataacgaggcatggacgtgttgtgagcggaggcctagcctgttcaaggtctgaatttttacccctagaatgtaagaagcatgggagcagggactttgttttgctccctgccatatccacagccctagaaaaacgtcgggccattgatagctctcagtaaatgcttgacaagtaagtgaatgaacgaatgcacaattaatgaaatgagggctgcgtcaatgaataactgggaatctgactcctgcagggagccttcagcccacaggtgtatgtaagacccgccccgcctctcatccttcgggctcccacccccgccgttaggctgcggttcgcgccgcggtcgccagagggcgcggagcggcggggcttcccgcacggagggctttgcgtgaggcaccgcgtggggcggggctgcgggcgggctcccagctgctgggccctcatcggctgggcctcgtcgaccggcaagcggaacgcggcagcggggctgggcctgtgcggcggccgccggagcgctttggaaggcgcacggggcgaagatggcggcggagcgacaggaggcgctgagggagttcgtggcggtgacgggcgccgaggaggaccgggcccgcttctttctcgagtcggccggctgggacttgcagatcgcgctagcgagcttttatgaggacggaggggatgaagacattgtgaccattgggcggcagccagagttccctgaagtgggaagtcagagctccatgcacacagtgtcttcagaaggtgaaaataaatatttccctgtgctccttttactcaacccctggggtatctaatcttgccaggtcttggccagttgagattctgttccacctgcctgcctggccctttcctccattaccatccagactgctcgcctcctggggattctcaggggctccattatggcttgatttactccacgtgcagaagtcttgagtggacctaggaggtaggtgggatattttttttcactaggatacagctcatgccaacccatcctaagtgagttcagaatcagggtatcttgccctataagataaacagtcaaaatgccaccgagctgttcactagtgatgtgtggcaaatcaaatcaactgttgaagaaggggtgagttttctgtgctacaagcacctgtcactgttggtacttgcaggaggcttctgctgggtatgttttggaagtgagtgtcactacttggctttgcttagcaggttctgcttcacacttgttctttgacctgctgacttgtgacttgcagaaacataggcagtagtcctagcctggtaaagaccctccaccacccctataagtttgattgctatgcaggtttgggagaggaggcctattgggctcttggatggaaccctttcccgtattaaacaaaccagagacagaatcagtgctgactcaggatctcctggtttggaatcgtaatgtgcctcaatcctctttccaagcaggcctcaccagtctctttctctttcctgcttcacccctgcaatgagccaagaaccaacactacatccacctagaactgcagaagggcttgtggtttcaaccaagacccatcctgagcaagggacttggcttggtgcttttgatcccaaagttcccacaccggcagtggcctgctggggcaatggcatctgtcacggtgttttctccagcaggtggagattatggaacctacatatgggtctggaaaaactgtacactgttgtcaccttgaccattaaaaaccagaatgaggacaatgga

SEQ ID NO: 10585 - protein, 91 aa, Homo sapiens
MAAERQEALREFVAVTGAEEDRARFFLESAGWDLQIALASFYEDGGDEDIVTIGRQPEFPEVGSQSSMHTVSSEGENKYFPVLLLLNPWGI

SEQ ID NO: 10586 - DNA, 3585 bp, Homo sapiens
catgagactgtcttttatgcggggcgagataacgaggcatggacgtgttgtgagcggaggcctagcctgttcaaggtctgaatttttacccctagaatgtaagaagcatgggagcagggactttgttttgctccctgccatatccacagccctagaaaaacgtcgggccattgatagctctcagtaaatgcttgacaagtaagtgaatgaacgaatgcacaattaatgaaatgagggctgcgtcaatgaataactgggaatctgactcctgcagggagccttcagcccacaggtgtatgtaagacccgccccgcctctcatccttcgggctcccacccccgccgttaggctgcggttcgcgccgcggtcgccagagggcgcggagcggcggggcttcccgcacggagggctttgcgtgaggcaccgcgtggggcggggctgcgggcgggctcccagctgctgggccctcatcggctgggcctcgtcgaccggcaagcggaacgcggcagcggggctgggcctgtgcggcggccgccggagcgctttggaaggcgcacggggcgaagatggcggcggagcgacaggaggcgctgagggagttcgtggcggtgacgggcgccgaggaggaccgggcccgcttctttctcgagtcggccggctgggacttgcagatcgcgctagcgagcttttatgaggacggaggggatgaagacattgtgaccatttcgcaggcaacccccagttcagtgtccagaggcacagcccccagtgataatagagtgacatccttcagagacctcattcatgaccaagatgaagatgaggaggaagaggaaggccagaggttttatgctgggggctcagagagaagtggacagcagattgttggccctcccaggaagaaaagtcccaacgagctggtggatgatctctttaaaggtgccaaagagcatggagctgtagctgtggagcgagtgaccaagagccctggagagaccagtaaaccgagaccatttgcaggaggtggctaccgccttggggcagcaccagaggaagagtctgcctatgtggcaggagaaaagaggcagcattccagccaagatgttcatgtagtattgaaactctggaagagtggattcagcctggataatggagaactcagaagctaccaagacccatccaatgcccagtttctggagtctatccgcagaggggaggtgccagcagagcttcggaggctagctcacggtggacaggtgaacttggatatggaggaccatcgggacgaggactttgtgaagcccaaaggagccttcaaagccttcactggcgagggtcagaaactgggcaggctgtcctgctttcctcccttcaagcccttgttcagttgaagacaccaaggaggaaaaaggccgagtaacttgcccacattactcaggagcgagggagctagcaataacgtatgaaatatatgactcagggtttgaagtgaattctgctggacctgtaagttccataagggcacgattttccctgtctgggtcaatagatcagcagcaccaaacaatgccaggcgcattgcaaatgctcagtaacagtccaagaagggattcccttcttgctaggggccttgtttctgcttgtgttctgatgccatcctctctcctcagcactgccccccaggtgttgagtaccagctctccagcccaacaggcagaaaatgaagccaaagccagctcttccatcttaatcgacgaatcagagcctaccacaaacatccaaattcggcttgcagacggcgggaggctggtgcagaaatttaaccacagccacaggatcagcgacatccgactcttcatcgtggatgcccggccagccatggctgccaccagctttatcctcatgactactttcccgaacaaagagctggctgatgagagccagaccctgaaggaagccaacctgctcaatgctgtcatcgtgcagcggttaacataaccgcccagccagctgcctggcctccctcctgtgtttcccatggccagtggccatgccccatggggatcgcccctcctgcccccttgtgcacacccagcagtccagtgcaacgtctcctccatagctctgggttcttagatcttggttggacgtttgttttctccttagttgcatttcctgggtttttgtgatgatcaatggactttaatgaaaaaaaaaataaaaacaaccaaaaaaattgaaggaatatcaccagcatgttgtacggaaactctcccactgaagcaggctttaattgctttaaaattatatttatcttggggcctgtgggaggaaacttccttccatcttctctgcataaaaacttgtggcacacaatgcttattcactagtgtgtcccacccgccagccccacagatgactggaggaaggaggggaaatgtgtagaaagaggcttcgccaccacttgttcccacgagaatatgtcacttgcccagataaaactgggcggcagccagagttccctgaagtgggaagtcagagctccatgcacacagtgtcttcagaaggtgaaaataaatatttccctgtgctccttttactcaacccctggggtatctaatcttgccaggtcttggccagttgagattctgttccacctgcctgcctggccctttcctccattaccatccagactgctcgcctcctggggattctcaggggctccattatggcttgatttactccacgtgcagaagtcttgagtggacctaggaggtaggtgggatattttttttcactaggatacagctcatgccaacccatcctaagtgagttcagaatcagggtatcttgccctataagataaacagtcaaaatgccaccgagctgttcactagtgatgtgtggcaaatcaaatcaactgttgaagaaggggtgagttttctgtgctacaagcacctgtcactgttggtacttgcaggaggcttctgctgggtatgttttggaagtgagtgtcactacttggctttgcttagcaggttctgcttcacacttgttctttgacctgctgacttgtgacttgcagaaacataggcagtagtcctagcctggtaaagaccctccaccacccctataagtttgattgctatgcaggtttgggagaggaggcctattgggctcttggatggaaccctttcccgtattaaacaaaccagagacagaatcagtgctgactcaggatctcctggtttggaatcgtaatgtgcctcaatcctctttccaagcaggcctcaccagtctctttctctttcctgcttcacccctgcaatgagccaagaaccaacactacatccacctagaactgcagaagggcttgtggtttcaaccaagacccatcctgagcaagggacttggcttggtgcttttgatcccaaagttcccacaccggcagtggcctgctggggcaatggcatctgtcacggtgttttctccagcaggtggagattatggaacctacatatgggtctggaaaaactgtacactgttgtcaccttgaccattaaaaaccagaatgaggacaatgga

SEQ ID NO: 10587 - protein, 274 aa, Homo sapiens
MAAERQEALREFVAVTGAEEDRARFFLESAGWDLQIALASFYEDGGDEDIVTISQATPSSVSRGTAPSDNRVTSFRDLIHDQDEDEEEEEGQRFYAGGSERSGQQIVGPPRKKSPNELVDDLFKGAKEHGAVAVERVTKSPGETSKPRPFAGGGYRLGAAPEEESAYVAGEKRQHSSQDVHVVLKLWKSGFSLDNGELRSYQDPSNAQFLESIRRGEVPAELRRLAHGGQVNLDMEDHRDEDFVKPKGAFKAFTGEGQKLGRLSCFPPFKPLFS

SEQ ID NO: 10588 - DNA, 3455 bp, Homo sapiens
aactaggggtaaggaggtacaaagaacaaggaagttaggctttgaaaatagagaacaaagaacaagtaagctgaacaagtaagttcctctttggagaggcaagagggcaaagaagctgaggacccagaagacaggattgtgcctaagaaagtggccttggagcagaggcccaaagaaagcggggagagcgccttgcccatcggtaagggaaaggtgctccaggcacagaagcagctaatgcaacggccctgaggcaaatgcaagataactggcaagttccaggaacagcaaggagggcaaggcgcctggagcagaggaagctagcggatcccttgatgagagggaggaactggcccatctctcatgggtcctgcaggcaggccatgagactgtcttttatgcggggcgagataacgaggcatggacgtgttgtgagcggaggcctagcctgttcaaggtctgaatttttacccctagaatgtaagaagcatgggagcagggactttgttttgctccctgccatatccacagccctagaaaaacgtcgggccattgatagctctcagtaaatgcttgacaagtaagtgaatgaacgaatgcacaattaatgaaatgagggctgcgtcaatgaataactgggaatctgactcctgcagggagccttcagcccacaggtgtatgtaagacccgccccgcctctcatccttcgggctcccacccccgccgttaggctgcggttcgcgccgcggtcgccagagggcgcggagcggcggggcttcccgcacggagggctttgcgtgaggcaccgcgtggggcggggctgcgggcgggctcccagctgctgggccctcatcggctgggcctcgtcgaccggcaagcggaacgcggcagcggggctgggcctgtgcggcggccgccggagcgctttggaaggcgcacggggcgaagatggcggcggagcgacaggaggcgctgagggagttcgtggcggtgacgggcgccgaggaggaccgggcccgcttctttctcgagtcggccggctgggacttgcagtgataatagagtgacatccttcagagacctcattcatgaccaagatgaagatgaggaggaagaggaaggccagaggtgccaaagagcatggagctgtagctgtggagcgagtgaccaagagccctggagagaccagtaaaccgagaccatttgcaggaggtggctaccgccttggggcagcaccagaggaagagtctgcctatgtggcaggagaaaagaggcagcattccagccaagatgttcatgtagtattgaaactctggaagagtggattcagcctggataatggagaactcagaagctaccaagacccatccaatgcccagtttctggagtctatccgcagaggggaggtgccagcagagcttcggaggctagctcacggtggacaggtgaacttggatatggaggaccatcgggacgaggactttgtgaagcccaaaggagccttcaaagccttcactggcgagggtcagaaactgggcagcactgccccccaggtgttgagtaccagctctccagcccaacaggcagaaaatgaagccaaagccagctcttccatcttaatcgacgaatcagagcctaccacaaacatccaaattcggcttgcagacggcgggaggctggtgcagaaatttaaccacagccacaggatcagcgacatccgactcttcatcgtggatgcccggccagccatggctgccaccagctttatcctcatgactactttcccgaacaaagagctggctgatgagagccagaccctgaaggaagccaacctgctcaatgctgtcatcgtgcagcggttaacataaccgcccagccagctgcctggcctccctcctgtgtttcccatggccagtggccatgccccatggggatcgcccctcctgcccccttgtgcacacccagcagtccagtgcaacgtctcctccatagctctgggttcttagatcttggttggacgtttgttttctccttagttgcatttcctgggtttttgtgatgatcaatggactttaatgaaaaaaaaaataaaaacaaccaaaaaaattgaaggaatatcaccagcatgttgtacggaaactctcccactgaagcaggctttaattgctttaaaattatatttatcttggggcctgtgggaggaaacttccttccatcttctctgcataaaaacttgtggcacacaatgcttattcactagtgtgtcccacccgccagccccacagatgactggaggaaggaggggaaatgtgtagaaagaggcttcgccaccacttgttcccacgagaatatgtcacttgcccagataaaactgggcggcagccagagttccctgaagtgggaagtcagagctccatgcacacagtgtcttcagaaggtgaaaataaatatttccctgtgctccttttactcaacccctggggtatctaatcttgccaggtcttggccagttgagattctgttccacctgcctgcctggccctttcctccattaccatccagactgctcgcctcctggggattctcaggggctccattatggcttgatttactccacgtgcagaagtcttgagtggacctaggaggtaggtgggatattttttttcactaggatacagctcatgccaacccatcctaagtgagttcagaatcagggtatcttgccctataagataaacagtcaaaatgccaccgagctgttcactagtgatgtgtggcaaatcaaatcaactgttgaagaaggggtgagttttctgtgctacaagcacctgtcactgttggtacttgcaggaggcttctgctgggtatgttttggaagtgagtgtcactacttggctttgcttagcaggttctgcttcacacttgttctttgacctgctgacttgtgacttgcagaaacataggcagtagtcctagcctggtaaagaccctccaccacccctataagtttgattgctatgcaggtttgggagaggaggcctattgggctcttggatggaaccctttcccgtattaaacaaaccagagacagaatcagtgctgactcaggatctcctggtttggaatcgtaatgtgcctcaatcctctttccaagcaggcctcaccagtctctttctctttcctgcttcacccctgcaatgagccaagaaccaacactacatccacctagaactgcagaagggcttgtggtttcaaccaagacccatcctgagcaagggacttggcttggtgcttttgatcccaaagttcccacaccggcagtggcctgctggggcaatggcatctgtcacggtgttttctccagcaggtggagattatggaacctacatatgggtctggaaaaactgtacactgttgtcaccttgaccattaaaaaccagaatgaggacaatgga

SEQ ID NO: 10589 - protein, 259 aa, Homo sapiens; identical to SEQ ID NO: 1633

SEQ ID NO: 10590 - DNA, 3555 bp, Homo sapiens
aactaggggtaaggaggtacaaagaacaaggaagttaggctttgaaaatagagaacaaagaacaagtaagctgaacaagtaagttcctctttggagaggcaagagggcaaagaagctgaggacccagaagacaggattgtgcctaagaaagtggccttggagcagaggcccaaagaaagcggggagagcgccttgcccatcggtaagggaaaggtgctccaggcacagaagcagctaatgcaacggccctgaggcaaatgcaagataactggcaagttccaggaacagcaaggagggcaaggcgcctggagcagaggaagctagcggatcccttgatgagagggaggaactggcccatctctcatgggtcctgcaggcaggccatgagactgtcttttatgcggggcgagataacgaggcatggacgtgttgtgagcggaggcctagcctgttcaaggtctgaatttttacccctagaatgtaagaagcatgggagcagggactttgttttgctccctgccatatccacagccctagaaaaacgtcgggccattgatagctctcagtaaatgcttgacaagtaagtgaatgaacgaatgcacaattaatgaaatgagggctgcgtcaatgaataactgggaatctgactcctgcagggagccttcagcccacaggtgtatgtaagacccgccccgcctctcatccttcgggctcccacccccgccgttaggctgcggttcgcgccgcggtcgccagagggcgcggagcggcggggcttcccgcacggagggctttgcgtgaggcaccgcgtggggcggggctgcgggcgggctcccagctgctgggccctcatcggctgggcctcgtcgaccggcaagcggaacgcggcagcggggctgggcctgtgcggcggccgccggagcgctttggaaggcgcacggggcgaagatggcggcggagcgacaggaggcgctgagggagttcgtggcggtgacgggcgccgaggaggaccgggcccgcttctttctcgagtcggccggctgggacttgcagatcgcgctagcgagcttttatgaggacggaggggatgaagacattgtgaccatttcgcaggcaacccccagttcagtgtccagaggcacagcccccagtgataatagagtgacatccttcagagacctcattcatgaccaagatgaagatgaggaggaagaggaaggccagaggttttatgctgggggctcagagagaagtggacagcagattgttggccctcccaggaagaaaagtcccaacgagctggtggatgatctctttaaaggtgccaaagagcatggagctgtagctgtggagcgagtgaccaagagccctggagagaccagtaaaccgagagttcatgtagtattgaaactctggaagagtggattcagcctggataatggagaactcagaagctaccaagacccatccaatgcccagtttctggagtctatccgcagaggggaggtgccagcagagcttcggaggctagctcacggtggacaggtgaacttggatatggaggaccatcgggacgaggactttgtgaagcccaaaggagccttcaaagccttcactggcgagggtcagaaactgggcagcactgccccccaggtgttgagtaccagctctccagcccaacaggcagaaaatgaagccaaagccagctcttccatcttaatcgacgaatcagagcctaccacaaacatccaaattcggcttgcagacggcgggaggctggtgcagaaatttaaccacagccacaggatcagcgacatccgactcttcatcgtggatgcccggccagccatggctgccaccagctttatcctcatgactactttcccgaacaaagagctggctgatgagagccagaccctgaaggaagccaacctgctcaatgctgtcatcgtgcagcggttaacataaccgcccagccagctgcctggcctccctcctgtgtttcccatggccagtggccatgccccatggggatcgcccctcctgcccccttgtgcacacccagcagtccagtgcaacgtctcctccatagctctgggttcttagatcttggttggacgtttgttttctccttagttgcatttcctgggtttttgtgatgatcaatggactttaatgaaaaaaaaaataaaaacaaccaaaaaaattgaaggaatatcaccagcatgttgtacggaaactctcccactgaagcaggctttaattgctttaaaattatatttatcttggggcctgtgggaggaaacttccttccatcttctctgcataaaaacttgtggcacacaatgcttattcactagtgtgtcccacccgccagccccacagatgactggaggaaggaggggaaatgtgtagaaagaggcttcgccaccacttgttcccacgagaatatgtcacttgcccagataaaactgggcggcagccagagttccctgaagtgggaagtcagagctccatgcacacagtgtcttcagaaggtgaaaataaatatttccctgtgctccttttactcaacccctggggtatctaatcttgccaggtcttggccagttgagattctgttccacctgcctgcctggccctttcctccattaccatccagactgctcgcctcctggggattctcaggggctccattatggcttgatttactccacgtgcagaagtcttgagtggacctaggaggtaggtgggatattttttttcactaggatacagctcatgccaacccatcctaagtgagttcagaatcagggtatcttgccctataagataaacagtcaaaatgccaccgagctgttcactagtgatgtgtggcaaatcaaatcaactgttgaagaaggggtgagttttctgtgctacaagcacctgtcactgttggtacttgcaggaggcttctgctgggtatgttttggaagtgagtgtcactacttggctttgcttagcaggttctgcttcacacttgttctttgacctgctgacttgtgacttgcagaaacataggcagtagtcctagcctggtaaagaccctccaccacccctataagtttgattgctatgcaggtttgggagaggaggcctattgggctcttggatggaaccctttcccgtattaaacaaaccagagacagaatcagtgctgactcaggatctcctggtttggaatcgtaatgtgcctcaatcctctttccaagcaggcctcaccagtctctttctctttcctgcttcacccctgcaatgagccaagaaccaacactacatccacctagaactgcagaagggcttgtggtttcaaccaagacccatcctgagcaagggacttggcttggtgcttttgatcccaaagttcccacaccggcagtggcctgctggggcaatggcatctgtcacggtgttttctccagcaggtggagattatggaacctacatatgggtctggaaaaactgtacactgttgtcaccttgaccattaaaaaccagaatgaggacaatgga

SEQ ID NO: 10591 - protein, 339 aa, Homo sapiens; identical to SEQ ID NO: 1631

SEQ ID NO: 10592 - DNA, 3648 bp, Homo sapiens
aactaggggtaaggaggtacaaagaacaaggaagttaggctttgaaaatagagaacaaagaacaagtaagctgaacaagtaagttcctctttggagaggcaagagggcaaagaagctgaggacccagaagacaggattgtgcctaagaaagtggccttggagcagaggcccaaagaaagcggggagagcgccttgcccatcggtaagggaaaggtgctccaggcacagaagcagctaatgcaacggccctgaggcaaatgcaagataactggcaagttccaggaacagcaaggagggcaaggcgcctggagcagaggaagctagcggatcccttgatgagagggaggaactggcccatctctcatgggtcctgcaggcaggccatgagactgtcttttatgcggggcgagataacgaggcatggacgtgttgtgagcggaggcctagcctgttcaaggtctgaatttttacccctagaatgtaagaagcatgggagcagggactttgttttgctccctgccatatccacagccctagaaaaacgtcgggccattgatagctctcagtaaatgcttgacaagtaagtgaatgaacgaatgcacaattaatgaaatgagggctgcgtcaatgaataactgggaatctgactcctgcagggagccttcagcccacaggtgtatgtaagacccgccccgcctctcatccttcgggctcccacccccgccgttaggctgcggttcgcgccgcggtcgccagagggcgcggagcggcggggcttcccgcacggagggctttgcgtgaggcaccgcgtggggcggggctgcgggcgggctcccagctgctgggccctcatcggctgggcctcgtcgaccggcaagcggaacgcggcagcggggctgggcctgtgcggcggccgccggagcgctttggaaggcgcacggggcgaagatggcggcggagcgacaggaggcgctgagggagttcgtggcggtgacgggcgccgaggaggaccgggcccgcttctttctcgagtcggccggctgggacttgcagatcgcgctagcgagcttttatgaggacggaggggatgaagacattgtgaccatttcgcaggcaacccccagttcagtgtccagaggcacagcccccagtgataatagagtgacatccttcagagacctcattcatgaccaagatgaagatgaggaggaagaggaaggccagaggttttatgctgggggctcagagagaagtggacagcagattgttggccctcccaggaagaaaagtcccaacgagctggtggatgatctctttaaaggtgccaaagagcatggagctgtagctgtggagcgagtgaccaagagccctggagagaccagtaaaccgagaccatttgcaggaggtggctaccgccttggggcagcaccagaggaagagtctgcctatgtggcaggagaaaagaggcagcattccagccaagatgttcatgtagtattgaaactctggaagagtggattcagcctggataatggagaactcagaagctaccaagacccatccaatgcccagtttctggagtctatccgcagaggggaggtgccagcagagcttcggaggctagctcacggtggacaggtgaacttggatatggaggaccatcgggacgaggactttgtgaagcccaaaggagccttcaaagccttcactggcgagggtcagaaactgggcagcactgccccccaggtgttgagtaccagctctccagcccaacaggcagaaaatgaagccaaagccagctcttccatcttaatcgacgaatcagagcctaccacaaacatccaaattcggcttgcagacggcgggaggctggtgcagaaatttaaccacagccacaggatcagcgacatccgactcttcatcgtggatgcccggccagccatggctgccaccagctttatcctcatgactactttcccgaacaaagagctggctgatgagagccagaccctgaaggaagccaacctgctcaatgctgtcatcgtgcagcggttaacataaccgcccagccagctgcctggcctccctcctgtgtttcccatggccagtggccatgccccatggggatcgcccctcctgcccccttgtgcacacccagcagtccagtgcaacgtctcctccatagctctgggttcttagatcttggttggacgtttgttttctccttagttgcatttcctgggtttttgtgatgatcaatggactttaatgaaaaaaaaaataaaaacaaccaaaaaaattgaaggaatatcaccagcatgttgtacggaaactctcccactgaagcaggctttaattgctttaaaattatatttatcttggggcctgtgggaggaaacttccttccatcttctctgcataaaaacttgtggcacacaatgcttattcactagtgtgtcccacccgccagccccacagatgactggaggaaggaggggaaatgtgtagaaagaggcttcgccaccacttgttcccacgagaatatgtcacttgcccagataaaactgggcggcagccagagttccctgaagtgggaagtcagagctccatgcacacagtgtcttcagaaggtgaaaataaatatttccctgtgctccttttactcaacccctggggtatctaatcttgccaggtcttggccagttgagattctgttccacctgcctgcctggccctttcctccattaccatccagactgctcgcctcctggggattctcaggggctccattatggcttgatttactccacgtgcagaagtcttgagtggacctaggaggtaggtgggatattttttttcactaggatacagctcatgccaacccatcctaagtgagttcagaatcagggtatcttgccctataagataaacagtcaaaatgccaccgagctgttcactagtgatgtgtggcaaatcaaatcaactgttgaagaaggggtgagttttctgtgctacaagcacctgtcactgttggtacttgcaggaggcttctgctgggtatgttttggaagtgagtgtcactacttggctttgcttagcaggttctgcttcacacttgttctttgacctgctgacttgtgacttgcagaaacataggcagtagtcctagcctggtaaagaccctccaccacccctataagtttgattgctatgcaggtttgggagaggaggcctattgggctcttggatggaaccctttcccgtattaaacaaaccagagacagaatcagtgctgactcaggatctcctggtttggaatcgtaatgtgcctcaatcctctttccaagcaggcctcaccagtctctttctctttcctgcttcacccctgcaatgagccaagaaccaacactacatccacctagaactgcagaagggcttgtggtttcaaccaagacccatcctgagcaagggacttggcttggtgcttttgatcccaaagttcccacaccggcagtggcctgctggggcaatggcatctgtcacggtgttttctccagcaggtggagattatggaacctacatatgggtctggaaaaactgtacactgttgtcaccttgaccattaaaaaccagaatgaggacaatgga

SEQ ID NO: 10593 - protein, 370 aa, Homo sapiens; identical to SEQ ID NO: 1629

SEQ ID NO: 10594 - DNA, 797 bp, Homo sapiens
aggttttatgctgggggctcagagagaagtggacagcagattgttggccctcccaggaagaaaagtcccaacgagctggtggatgatctctttaaaggtgccaaagagcatggagctgtagctgtggagcgagtgaccaagagccctggagagaccagtaaaccgagaccatttgcaggaggtggctaccgccttggggcacactgccccccaggtgttgagtaccagctctccagcccaacaggcagaaaatgaagccaaagccagctcttccatcttaatcgacgaatcagagcctaccacaaacatccaaattcggcttgcagacggcgggaggctggtgcagaaatttaaccacagccacaggatcagcgacatccgactcttcatcgtggatgcccggccagccatggctgccaccagctttatcctcatgactactttcccgaacaaagagctggctgatgagagccagaccctgaaggaagccaacctgctcaatgctgtcatcgtgcagcggttaacataaccgcccagccagctgcctggcctccctcctgtgtttcccatggccagtggccatgccccatggggatcgcccctcctgcccccttgtgcacacccagcagtccagtgcaacgtctcctccatagctctgggttcttagatcttggttggacgtttgttttctccttagttgcatttcctgggtttttgtgatgatcaatggactttaatgaaaaaaaaaataaaaacaaccaaaaaaattgaaggaatatcaccagcatgttgtacgg

SEQ ID NO: 10595 - protein, 43 aa, Homo sapiens
MGIAPPAPLCTPSSPVQRLLHSSGFLDLGWTFVFSLVAFPGFL

SEQ ID NO: 10596 - DNA, 2266 bp, Homo sapiens
catgagactgtcttttatgcggggcgagataacgaggcatggacgtgttgtgagcggaggcctagcctgttcaaggtctgaatttttacccctagaatgtaagaagcatgggagcagggactttgttttgctccctgccatatccacagccctagaaaaacgtcgggccattgatagctctcagtaaatgcttgacaagtaagtgaatgaacgaatgcacaattaatgaaatgagggctgcgtcaatgaataactgggaatctgactcctgcagggagccttcagcccacaggtgtatgtaagacccgccccgcctctcatccttcgggctcccacccccgccgttaggctgcggttcgcgccgcggtcgccagagggcgcggagcggcggggcttcccgcacggagggctttgcgtgaggcaccgcgtggggcggggctgcgggcgggctcccagctgctgggccctcatcggctgggcctcgtcgaccggcaagcggaacgcggcagcggggctgggcctgtgcggcggccgccggagcgctttggaaggcgcacggggcgaagatggcggcggagcgacaggaggcgctgagggagttcgtggcggtgacgggcgccgaggaggaccgggcccgcttctttctcgagtcggccggctgggacttgcagatcgcgctagcgagcttttatgaggacggaggggatgaagacattgtgaccatttcgcaggcaacccccagttcagtgtccagaggcacagcccccagtgataatagagtgacatccttcagagacctcattcatgaccaagatgaagatgaggaggaagaggaaggccagaggttttatgctgggggctcagagagaagtggacagcagattgttggccctcccaggaagaaaagtcccaacgagctggtggatgatctctttaaaggtgccaaagagcatggagctgtagctgtggagcgagtgaccaagagccctggagagaccagtaaaccgagaccatttgcaggaggtggctaccgccttggggcagcaccagaggaagagtctgcctatgtggcaggagaaaagaggcagcattccagccaagatgttcatgtagtattgaaactctggaagagtggattcagcctggataatggagaactcagaagctaccaagacccatccaatgcccagtttctggagtctatccgcagaggggaggtgccagcagagcttcggaggctagctcacggtggacaggtgaacttggatatggaggaccatcgggacgaggactttgtgaagcccaaaggagccttcaaagccttcactggcgagggtcagaaactgggcaggctgtcctgctttcctcccttcaagcccttgttcagttgaagacaccaaggaggaaaaaggccgagtaacttgcccacattactcaggagcgagggagctagcaataacgtatgaaatatatgactcagggtttgaagtgaattctgctggacctgtaagttccataagggcacgattttccctgtctgggtcaatagatcagcagcaccaaacaatgccaggcgcattgcaaatgctcagtaacagtccaagaagggattcccttcttgctaggggccttgtttctgcttgtgttctgatgccatcctctctcctcagcactgccccccaggtgttgagtaccagctctccagcccaacaggcagaaaatgaagccaaagccagctcttccatcttaatcgacgaatcagagcctaccacaaacatccaaattcggcttgcagacggcgggaggctggtgcagaaatttaaccacagccacaggatcagcgacatccgactcttcatcgtggatgcccggccagccatggctgccaccagctttatcctcatgactactttcccgaacaaagagctggctgatgagagccagaccctgaaggaagccaacctgctcaatgctgtcatcgtgcagcggttaacataaccgcccagccagctgcctggcctccctcctgtgtttcccatggccagtggccatgccccatggggatcgcccctcctgcccccttgtgcacacccagcagtccagtgcaacgtctcctccatagctctgggttcttagatcttggttggacgtttgttttctccttagttgcatttcctgggtttttgtgatgatcaatggactttaatgaaaaaaaaaataaaaacaaccaaaaaaattgaaggaatatcaccagcatgttgtacgg

SEQ ID NO: 10597 - protein, 274 aa, Homo sapiens; identical to SEQ ID NO: 10587

SEQ ID NO: 10598 - DNA, 2329 bp, Homo sapiens
aactaggggtaaggaggtacaaagaacaaggaagttaggctttgaaaatagagaacaaagaacaagtaagctgaacaagtaagttcctctttggagaggcaagagggcaaagaagctgaggacccagaagacaggattgtgcctaagaaagtggccttggagcagaggcccaaagaaagcggggagagcgccttgcccatcggtaagggaaaggtgctccaggcacagaagcagctaatgcaacggccctgaggcaaatgcaagataactggcaagttccaggaacagcaaggagggcaaggcgcctggagcagaggaagctagcggatcccttgatgagagggaggaactggcccatctctcatgggtcctgcaggcaggccatgagactgtcttttatgcggggcgagataacgaggcatggacgtgttgtgagcggaggcctagcctgttcaaggtctgaatttttacccctagaatgtaagaagcatgggagcagggactttgttttgctccctgccatatccacagccctagaaaaacgtcgggccattgatagctctcagtaaatgcttgacaagtaagtgaatgaacgaatgcacaattaatgaaatgagggctgcgtcaatgaataactgggaatctgactcctgcagggagccttcagcccacaggtgtatgtaagacccgccccgcctctcatccttcgggctcccacccccgccgttaggctgcggttcgcgccgcggtcgccagagggcgcggagcggcggggcttcccgcacggagggctttgcgtgaggcaccgcgtggggcggggctgcgggcgggctcccagctgctgggccctcatcggctgggcctcgtcgaccggcaagcggaacgcggcagcggggctgggcctgtgcggcggccgccggagcgctttggaaggcgcacggggcgaagatggcggcggagcgacaggaggcgctgagggagttcgtggcggtgacgggcgccgaggaggaccgggcccgcttctttctcgagtcggccggctgggacttgcagatcgcgctagcgagcttttatgaggacggaggggatgaagacattgtgaccatttcgcaggcaacccccagttcagtgtccagaggcacagcccccagtgataatagagtgacatccttcagagacctcattcatgaccaagatgaagatgaggaggaagaggaaggccagaggttttatgctgggggctcagagagaagtggacagcagattgttggccctcccaggaagaaaagtcccaacgagctggtggatgatctctttaaaggtgccaaagagcatggagctgtagctgtggagcgagtgaccaagagccctggagagaccagtaaaccgagaccatttgcaggaggtggctaccgccttggggcagcaccagaggaagagtctgcctatgtggcaggagaaaagaggcagcattccagccaagatgttcatgtagtattgaaactctggaagagtggattcagcctggataatggagaactcagaagctaccaagacccatccaatgcccagtttctggagtctatccgcagaggggaggtgccagcagagcttcggaggctagctcacggtggacaggtgaacttggatatggaggaccatcgggacgaggactttgtgaagcccaaaggagccttcaaagccttcactggcgagggtcagaaactgggcagcactgccccccaggtgttgagtaccagctctccagcccaacaggcagaaaatgaagccaaagccagctcttccatcttaatcgacgaatcagagcctaccacaaacatccaaattcggcttgcagacggcgggaggctggtgcagaaatttaaccacagccacaggatcagcgacatccgactcttcatcgtggatgcccggccagccatggctgccaccagctttatcctcatgactactttcccgaacaaagagctggctgatgagagccagaccctgaaggaagccaacctgctcaatgctgtcatcgtgcagcggttaacataaccgcccagccagctgcctggcctccctcctgtgtttcccatggccagtggccatgccccatggggatcgcccctcctgcccccttgtgcacacccagcagtccagtgcaacgtctcctccatagctctgggttcttagatcttggttggacgtttgttttctccttagttgcatttcctgggtttttgtgatgatcaatggactttaatgaaaaaaaaaataaaaacaaccaaaaaaattgaaggaatatcaccagcatgttgtacgg

SEQ ID NO: 10599 - protein, 370 aa, Homo sapiens; identical to SEQ ID NO: 1629

SEQ ID NO: 10600 - DNA, 1887 bp, Homo sapiens
gactgtcttttatgcggggcgagataacgaggcatggacgtgttgtgagcggaggcctagcctgttcaaggtctgaatttttacccctagaatgtaagaagcatgggagcagggactttgttttgctccctgccatatccacagccctagaaaaacgtcgggccattgatagctctcagtaaatgcttgacaagtaagtgaatgaacgaatgcacaattaatgaaatgagggctgcgtcaatgaataactgggaatctgactcctgcagggagccttcagcccacaggtgtatgtaagacccgccccgcctctcatccttcgggctcccacccccgccgttaggctgcggttcgcgccgcggtcgccagagggcgcggagcggcggggcttcccgcacggagggctttgcgtgaggcaccgcgtggggcggggctgcgggcgggctcccagctgctgggccctcatcggctgggcctcgtcgaccggcaagcggaacgcggcagcggggctgggcctgtgcggcggccgccggagcgctttggaaggcgcacggggcgaagatggcggcggagcgacaggaggcgctgagggagttcgtggcggtgacgggcgccgaggaggaccgggcccgcttctttctcgagtcggccggctgggacttgcagatcgcgctagcgagcttttatgaggacggaggggatgaagacattgtgaccatttcgcaggcaacccccagttcagtgtccagaggcacagcccccagtgataatagagtgacatccttcagagacctcattcatgaccaagatgaagatgaggaggaagaggaaggccagaggtgccaaagagcatggagctgtagctgtggagcgagtgaccaagagccctggagagaccagtaaaccgagaccatttgcaggaggtggctaccgccttggggcagcaccagaggaagagtctgcctatgtggcaggagaaaagaggcagcattccagccaagatgttcatgtagtattgaaactctggaagagtggattcagcctggataatggagaactcagaagctaccaagacccatccaatgcccagtttctggagtctatccgcagaggggaggtgccagcagagcttcggaggctagctcacggtggacaggtgaacttggatatggaggaccatcgggacgaggactttgtgaagcccaaaggagccttcaaagccttcactggcgagggtcagaaactgggcaggctgtcctgctttcctcccttcaagcccttgttcagttgaagacaccaaggaggaaaaaggccgagtaacttgcccacattactcaggagcgagggagctagcaataacgtatgaaatatatgactcagggtttgaagtgaattctgctggacctgtaagttccataagggcacgattttccctgtctgggtcaatagatcagcagcaccaaacaatgccaggcgcattgcaaatgctcagtaacagtccaagaagggattcccttcttgctaggggccttgtttctgcttgtgttctgatgccatcctctctcctcagcactgccccccaggtgttgagtaccagctctccagcccaacaggcagaaaatgaagccaaagccagctcttccatcttaatcgacgaatcagagcctaccacaaacatccaaattcggcttgcagacggcgggaggctggtgcagaaatttaaccacagccacaggtaccttgcattgtgtggcctagcttattctaggagtgtcctctgggcctcacgcaaatgtgtgggaagcagagagccgttcttcctcctaaataccagcaggcactccatgctttccccaaagcagacacgagggtggtaaggactacaag

SEQ ID NO: 10601 - protein, 163 aa, Homo sapiens [sequence omitted]

SEQ ID NO: 10602 - DNA, 435 bp, Homo sapiens
gctctattcatgttttccatgagtgtttcatgttagaggtgtattttgtacacaggttttatgctgggggctcagagagaagtggacagcagattgttggccctcccaggaagaaaagtcccaacgagctggtggatgatctctttaaaggtgccaaagagcatggagctgtagctgtggagcgagtgaccaagagccctggagagaccagtaaaccgagaccatttgcaggaggtggctaccgccttggggcagcaccagaggaagagtctgcctatgtggcaggagaaaagaggcagcattccagccaagatgttcatgtagtattgaaactctggaagagtggattcagcctggataatggagaactcagaaaaaatgaagccaaagccagctcttccatcttaatcgacgaatcagagcctaccacaaaca

SEQ ID NO: 10603 - protein, 134 aa, Homo sapiens
MLEVYFVHRFYAGGSERSGQQIVGPPRKKSPNELVDDLFKGAKEHGAVAVERVTKSPGETSKPRPFAGGGYRLGAAPEEESAYVAGEKRQHSSQDVHVVLKLWKSGFSLDNGELRKNEAKASSSILIDESEPTT

SEQ ID NO: 10604 - DNA, 1161 bp, Homo sapiens
catgagactgtcttttatgcggggcgagataacgaggcatggacgtgttgtgagcggaggcctagcctgttcaaggtctgaatttttacccctagaatgtaagaagcatgggagcagggactttgttttgctccctgccatatccacagccctagaaaaacgtcgggccattgatagctctcagtaaatgcttgacaagtaagtgaatgaacgaatgcacaattaatgaaatgagggctgcgtcaatgaataactgggaatctgactcctgcagggagccttcagcccacaggtgtatgtaagacccgccccgcctctcatccttcgggctcccacccccgccgttaggctgcggttcgcgccgcggtcgccagagggcgcggagcggcggggcttcccgcacggagggctttgcgtgaggcaccgcgtggggcggggctgcgggcgggctcccagctgctgggccctcatcggctgggcctcgtcgaccggcaagcggaacgcggcagcggggctgggcctgtgcggcggccgccggagcgctttggaaggcgcacggggcgaagatggcggcggagcgacaggaggcgctgagggagttcgtggcggtgacgggcgccgaggaggaccgggcccgcttctttctcgagtcggccggctgggacttgcagatcgcgctagcgagcttttatgaggacggaggggatgaagacattgtgaccatttcgcaggcaacccccagttcagtgtccagaggcacagcccccagtgataatagagtgacatccttcagagacctcattcatgaccaagatgaagatgaggaggaagaggaaggccagaggttttatgctgggggctcagagagaagtggacagcagattgttggccctcccaggaagaaaagtcccaacgagctggtggatgatctctttaaaggtgccaaagagcatggagctgtagctgtggagcgagtgaccaagagccctggagagaccagtaaaccgagaccatttgcaggaggtggctaccgccttggggcagcaccagaggaagagtctgcctatgtggcaggagaaaagaggcagcattccagccaagatgttcatgtagtattgaaactctggaagagtggattcagcctggataatggagaactca

SEQ ID NO: 10605 - protein, 197 aa, Homo sapiens
MAAERQEALREFVAVTGAEEDRARFFLESAGWDLQIALASFYEDGGDEDIVTISQATPSSVSRGTAPSDNRVTSFRDLIHDQDEDEEEEEGQRFYAGGSERSGQQIVGPPRKKSPNELVDDLFKGAKEHGAVAVERVTKSPGETSKPRPFAGGGYRLGAAPEEESAYVAGEKRQHSSQDVHVVLKLWKSGFSLDNGE

SEQ ID NO: 10606 - DNA, 1084 bp, Homo sapiens
catgagactgtcttttatgcggggcgagataacgaggcatggacgtgttgtgagcggaggcctagcctgttcaaggtctgaatttttacccctagaatgtaagaagcatgggagcagggactttgttttgctccctgccatatccacagccctagaaaaacgtcgggccattgatagctctcagtaaatgcttgacaagtaagtgaatgaacgaatgcacaattaatgaaatgagggctgcgtcaatgaataactgggaatctgactcctgcagggagccttcagcccacaggtgtatgtaagacccgccccgcctctcatccttcgggctcccacccccgccgttaggctgcggttcgcgccgcggtcgccagagggcgcggagcggcggggcttcccgcacggagggctttgcgtgaggcaccgcgtggggcggggctgcgggcgggctcccagctgctgggccctcatcggctgggcctcgtcgaccggcaagcggaacgcggcagcggggctgggcctgtgcggcggccgccggagcgctttggaaggcgcacggggcgaagatggcggcggagcgacaggaggcgctgagggagttcgtggcggtgacgggcgccgaggaggaccgggcccgcttctttctcgagtcggccggctgggacttgcagatcgcgctagcgagcttttatgaggacggaggggatgaagacattgtgaccatttcgcaggcaacccccagttcagtgtccagaggcacagcccccagtgataatagagtgacatccttcagagacctcattcatgaccaagatgaagatgaggaggaagaggaaggccagaggttttatgctgggggctcagagagaagtggacagcagattgttggccctcccaggaagaaaagtcccaacgagctggtggatgatctctttaaaggtgccaaagagcatggagctgtagctgtggagcgagtgaccaagagccctggagagaccagtaaaccgagaccatttgcaggaggtggctaccgccttggggcagcaccagaggaagagtctgcctatgtggcaggagaaaagag

SEQ ID NO: 10607 - protein, 171 aa, Homo sapiens
MAAERQEALREFVAVTGAEEDRARFFLESAGWDLQIALASFYEDGGDEDIVTISQATPSSVSRGTAPSDNRVTSFRDLIHDQDEDEEEEEGQRFYAGGSERSGQQIVGPPRKKSPNELVDDLFKGAKEHGAVAVERVTKSPGETSKPRPFAGGGYRLGAAPEEESAYVAGE

SEQ ID NO: 10608 - DNA, 1237 bp, Homo sapiens
gactgtcttttatgcggggcgagataacgaggcatggacgtgttgtgagcggaggcctagcctgttcaaggtctgaatttttacccctagaatgtaagaagcatgggagcagggactttgttttgctccctgccatatccacagccctagaaaaacgtcgggccattgatagctctcagtaaatgcttgacaagtaagtgaatgaacgaatgcacaattaatgaaatgagggctgcgtcaatgaataactgggaatctgactcctgcagggagccttcagcccacaggtgtatgtaagacccgccccgcctctcatccttcgggctcccacccccgccgttaggctgcggttcgcgccgcggtcgccagagggcgcggagcggcggggcttcccgcacggagggctttgcgtgaggcaccgcgtggggcggggctgcgggcgggctcccagctgctgggccctcatcggctgggcctcgtcgaccggcaagcggaacgcggcagcggggctgggcctgtgcggcggccgccggagcgctttggaaggcgcacggggcgaagatggcggcggagcgacaggaggcgctgagggagttcgtggcggtgacgggcgccgaggaggaccgggcccgcttctttctcgagtcggccggctgggacttgcagatcgcgctagcgagcttttatgaggacggaggggatgaagacattgtgaccatttcgcaggcaacccccagttcagtgtccagaggcacagcccccagtgataatagagtgacatccttcagagacctcattcatgaccaagatgaagatgaggaggaagaggaaggccagaggtgagtcttctagagggggtcagggggacagttcacagggaagtccagggtaatgtgtaaatcacctagaacaggacctggtaaacatgtttggttattgttagccattactactgtgggctggtctgtgtgggttatatcttaggaagtctcttctactccttgtagcttagaagtgacccctgttccgttacttaatgtatttattgaggaatattaggggagggaaacaaggaaaagatctagcagtcccactttttggtattgactaaaaagatttgaaatcagtttgtaaagaggtgtctacgttcccgtgctcattgcggtgctcttcacagtagcgaagttatggatcagcataagtgtcttaccagcagatgaatggataaagcaaatgt

SEQ ID NO: 10609 - protein, 93 aa, Homo sapiens
MAAERQEALREFVAVTGAEEDRARFFLESAGWDLQIALASFYEDGGDEDIVTISQATPSSVSRGTAPSDNRVTSFRDLIHDQDEDEEEEEGQR

SEQ ID NO: 10610 - DNA, 986 bp, Homo sapiens
gactgtcttttatgcggggcgagataacgaggcatggacgtgttgtgagcggaggcctagcctgttcaaggtctgaatttttacccctagaatgtaagaagcatgggagcagggactttgttttgctccctgccatatccacagccctagaaaaacgtcgggccattgatagctctcagtaaatgcttgacaagtaagtgaatgaacgaatgcacaattaatgaaatgagggctgcgtcaatgaataactgggaatctgactcctgcagggagccttcagcccacaggtgtatgtaagacccgccccgcctctcatccttcgggctcccacccccgccgttaggctgcggttcgcgccgcggtcgccagagggcgcggagcggcggggcttcccgcacggagggctttgcgtgaggcaccgcgtggggcggggctgcgggcgggctcccagctgctgggccctcatcggctgggcctcgtcgaccggcaagcggaacgcggcagcggggctgggcctgtgcggcggccgccggagcgctttggaaggcgcacggggcgaagatggcggcggagcgacaggaggcgctgagggagttcgtggcggtgacgggcgccgaggaggaccgggcccgcttctttctcgagtcggccggctgggacttgcagtgataatagagtgacatccttcagagacctcattcatgaccaagatgaagatgaggaggaagaggaaggccagaggtgagtcttctagagggggtcagggggacagttcacagggaagtccagggtaatgtgtaaatcacctagaacaggacctggtaaacatgtttggttattgttagccattactactgtgggctggtctgtgtgggttatatcttaggaagtctcttctactccttgtagcttagaagtgacccctgttccgttacttaatgtatttattgaggaatattaggggagggaaacaaggaaaagatcta

SEQ ID NO: 10611 - protein, 35 aa, Homo sapiens
MAAERQEALREFVAVTGAEEDRARFFLESAGWDLQ

SEQ ID NO: 10612 - DNA, 1195 bp, Homo sapiens
gactgtcttttatgcggggcgagataacgaggcatggacgtgttgtgagcggaggcctagcctgttcaaggtctgaatttttacccctagaatgtaagaagcatgggagcagggactttgttttgctccctgccatatccacagccctagaaaaacgtcgggccattgatagctctcagtaaatgcttgacaagtaagtgaatgaacgaatgcacaattaatgaaatgagggctgcgtcaatgaataactgggaatctgactcctgcagggagccttcagcccacaggtgtatgtaagacccgccccgcctctcatccttcgggctcccacccccgccgttaggctgcggttcgcgccgcggtcgccagagggcgcggagcggcggggcttcccgcacggagggctttgcgtgaggcaccgcgtggggcggggctgcgggcgggctcccagctgctgggccctcatcggctgggcctcgtcgaccggcaagcggaacgcggcagcggggctgggcctgtgcggcggccgccggagcgctttggaaggcgcacggggcgaagatggcggcggagcgacaggaggcgctgagggagttcgtggcggtgacgggcgccgaggaggaccgggcccgcttctttctcgagtcggccggctgggacttgcagatcgcgctagcgagcttttatgaggacggaggggatgaagacattgtgaccatttcgcaggcaacccccagttcagtgtccagaggcacagcccccaggtaagggccagcttcaattatcgctacatgagtgtttccagcagtgaagaggagctattttctgaccagagcgttcaggcctgggtgtgtggaccaggtctgaatgagaaggttagactgagtcaatgggtagtacttcccagcaggcctcagtcatttcctatacagagatgcatgacttttaactgggtgtggtttatggttcaatcctgggggaaaccacaaacctacttttaagacttttacttatgtagtatgaggaatgaccactgcaactctaaagtttttaagtaaaagccaaaaaacttcctttcaagggtgctatagatgtgaaagtttaggcgaaatgacttaggaaagctgttttgatattttaggatgcccgttaccttattaagaagtcttgtacaaaataaacctgtgtaacccac

SEQ ID NO: 10613 - protein, 68 aa, Homo sapiens
MAAERQEALREFVAVTGAEEDRARFFLESAGWDLQIALASFYEDGGDEDIVTISQATPSSVSRGTAPR

SEQ ID NO: 10614 - DNA, 1918 bp, Homo sapiens
accaacagccttgtgttgctgcaatgaaaacacttccccaagcagctgtggccaagagacgcagaaactgccttgtccacgggccccgcctcagactccaacactcacaagagagcagaggagccccaagtcttggggaccacagaagatgccatgtgctccacgatgtcggcccccacctgcctggcccacttgcctccctgcttcctgctgctggcactggtccttgtcccctcagatgcctctgggcagagcagcaggaatgactggcaggtgctacagcccgagggccccatgctggtggcagaaggtgagacacttctactgaggtgtatggtggtcggctcctgcactgatggtatgataaaatgggtgaaggtgagcactcaggaccaacaggaaatttataactttaaacgtggctccttccctggggtaatgcccatgatccaacggacatcagaaccactgaattgtgattattccatctatatccacaatgtcaccagggagcacactggaacctaccactgtgtgaggtttgatggtttgagtgaacactcagaaatgaaatcggatgaaggcacctcagtgcttgtgaagggagctggggaccctgaaccagacctgtggatcatccagccccaggaattggtgttggggaccactggagacactgtctttctgaactgcacagtgcttggagacggtccccctggacccatcaggtggttccagggagctggtctgagccgggaggccatttacaactttggaggcatctcccaccccaaggagacagcggtgcaggcctccaacaatgacttcagcattcttctgcaaaacgtctccagtgaggatgcaggcacctattactgtgtaaagtttcagaggaaacccaacaggcaatacctgtctggacagggcaccagcctgaaagtgaaagcaaaatctacctcttccaaagaggcagaattcaccagtgaacctgcaactgagatgtctccaacaggtttgcagtgatctgttacagcggccacgggaagctgaaacagcaggaaagcatggaggtggttctccactaactggagccaccctcattgaatcctgaaacgtggttgaaagctgactctgtgccaggccctaatcagtgtgctgagaaagaaacagaagtctgctctctcagagcttacctcctcccgagagaagacagacaatgagcaagtaaccctagggtggacagaagaggcctcctgataaagtgacatttgagcagacacctgaaggaggtgaggaagagagccctgcagatacccaggggaagagctgaaaagtacaaggaacagcgaatgcaaaggtcctgaggcaggagcgtgcttgacttgcacaagaacagcaaacaccaagcagaatgcctggcctgtattagaccccgtaaacgcctgaactacatacatggcagagatgaagcacacagtctcggaaatctggctgtgcaggttcaaattccagttctcctacttatctcttggggaagtgcgggaatcttcagttcttgtctgcttggaagaaagatttcagccaagagacacacagcaaaggtgaagtagcagagtttattgaagaaagataaagtacgttcctagaaaggagtgggctgacctggctggaaaacagcatcaggcaaaaaacagcagtagcagtgtttatttaaagagacagtacactctgaaagaacgagccagcagcagctggtgctgggggaccctctttatgagaatcttacatgattattcgtgcaggggcatgagggagcgtcacttacaatcatgttttaggtggtccccctggctgtgaatgttgtgtgtttgtacgcgctagtaaacacattgcctgtctcattagcatttaaaatctc

SEQ ID NO: 10615 - protein, 289 aa, Homo sapiens
MCSTMSAPTCLAHLPPCFLLLALVLVPSDASGQSSRNDWQVLQPEGPMLVAEGETLLLRCMVVGSCTDGMIKWVKVSTQDQQEIYNFKRGSFPGVMPMIQRTSEPLNCDYSIYIHNVTREHTGTYHCVRFDGLSEHSEMKSDEGTSVLVKGAGDPEPDLWIIQPQELVLGTTGDTVFLNCTVLGDGPPGPIRWFQGAGLSREAIYNFGGISHPKETAVQASNNDFSILLQNVSSEDAGTYYCVKFQRKPNRQYLSGQGTSLKVKAKSTSSKEAEFTSEPATEMSPTGLQ

SEQ ID NO: 10616 - DNA, 1595 bp, Homo sapiens
cacagtgactacaggaatcacagcccagacacaaaagcaggaaaccctttgaccgggctccttcctattgcaccaacagccttgtgttgctgcaatgaaaacacttccccaagcagctgtggccaagagacgcagaaactgccttgtccacgggccccgcctcagactccaacactcacaagagagcagaggagccccaagtcttggggaccacagaagatgccatgtgctccacgatgtcggcccccacctgcctggcccacttgcctccctgcttcctgctgctggcactggtccttgtcccctcagatgcctctgggcagagcagcaggaatgactggcaggtgctacagcccgagggccccatgctggtggcagaaggtgagacacttctactgaggtgtatggtggtcggctcctgcactgatggtatgataaaatgggtgaaggtgagcactcaggaccaacaggaaatttataactttaaacgtggctccttccctggggtaatgcccatgatccaacggacatcagaaccactgaattgtgattattccatctatatccacaatgtcaccagggagcacactggaacctaccactgtgtgaggtttgatggtttgagtgaacactcagaaatgaaatcggatgaaggcacctcagtgcttgtgaagggagctggggaccctgaaccagacctgtggatcatccagccccaggaattggtgttggggaccactggagacactgtctttctgaactgcacagtgcttggagacggtccccctggacccatcaggtggttccagggagctggtctgagccgggaggccatttacaactttggaggcatctcccaccccaaggagacagcggtgcaggcctccaacaatgacttcagcattcttctgcaaaacgtctccagtgaggatgcaggcacctattactgtgtaaagtttcagaggaaacccaacaggcaatacctgtctggacagggcaccagcctgaaagtgaaagcaaaatctacctcttccaaagaggcagaattcaccagtgaacctgcaactgagatgtctccaacaggtttgcagtgatctgttacagcggccacgggaagctgaaacagcaggaaagcatggaggtggttctccactaactggaggccctaatcagtgtgctgagaaagaaacagaagtctgctctctcagagcttacctcctcccgagagaagacagacaatgagcaagtaaccctagggtggacagaagaggcctcctgataaagtgacatttgagcagacacctgaaggaggtgaggaagagagccctgcagatacccaggggaagagctgaaaagtacaaggaacagcgaatgcaaaggtcctgaggcaggagcgtgcttgacttgcacaagaacagcaaacaccaagcagaatgcctggcctgtattagaccccgtaaacgcctgaactacatacatggcagagatgaagcacacagtctcggaaatctggctgtgcaggttcaaattccagttctcctacttatctcttgggtgagtttgtttctctcagtttccttgtctataaactggta

SEQ ID NO: 10617 - protein, 289 aa, Homo sapiens; identical to SEQ ID NO: 10615

SEQ ID NO: 10618 - DNA, 1130 bp, Homo sapiens
ttagcacagtgactacaggaatcacagcccagacacaaaagcaggaaaccctttgaccgggctccttcctattgcaccaacagccttgtgttgctgcaatgaaaacacttccccaagcagctgtggccaagagacgcagaaactgccttgtccacgggccccgcctcagactccaacactcacaagagagcagaggagccccaagtcttggggaccacagaagatgccatgtgctccacgatgtcggcccccacctgcctggcccacttgcctccctgcttcctgctgctggcactggtccttgtcccctcagatgcctctgggcagagcagcaggaatgactggcaggtgctacagcccgagggccccatgctggtggcagaaggtgagacacttctactgaggtgtatggtggtcggctcctgcactgatggtatgataaaatgggtgaaggtgagcactcaggaccaacaggaaatttataactttaaacgtggctccttccctggggtaatgcccatgatccaacggacatcagaaccactgaattgtgattattccatctatatccacaatgtcaccagggagcacactggaacctaccactgtgtgaggtttgatggtttgagtgaacactcagaaatgaaatcggatgaaggcacctcagtgcttgtgaagggagctggggaccctgaaccagacctgtggatcatccagccccaggaattggtgttggggaccactggagacactgtctttctgaactgcacagtgcttggagacggtccccctggacccatcaggtggttccagggagctggtctgagccgggaggccatttacaactttggaggcatctcccaccccaaggagacagcggtgcaggcctccaacaatgacttcagcattcttctgcaaaacgtctccagtgaggatgcaggcacctattactgtgtaaagtttcagaggaaacccaacaggcaatacctgtctggacagggcaccagcctgaaagtgaaagcaaaatctacctcttccaaagaggcagaattcaccagtgaacctgcaactgagatgtctccaacaggtgcaggaaagcatggaggtggttctccactaactggaggtgg

SEQ ID NO: 10619 - protein, 299 aa, Homo sapiens
MCSTMSAPTCLAHLPPCFLLLALVLVPSDASGQSSRNDWQVLQPEGPMLVAEGETLLLRCMVVGSCTDGMIKWVKVSTQDQQEIYNFKRGSFPGVMPMIQRTSEPLNCDYSIYIHNVTREHTGTYHCVRFDGLSEHSEMKSDEGTSVLVKGAGDPEPDLWIIQPQELVLGTTGDTVFLNCTVLGDGPPGPIRWFQGAGLSREAIYNFGGISHPKETAVQASNNDFSILLQNVSSEDAGTYYCVKFQRKPNRQYLSGQGTSLKVKAKSTSSKEAEFTSEPATEMSPTGAGKHGGGSPLTG

SEQ ID NO: 10620 - DNA, 2642 bp, Homo sapiens; identical to SEQ ID NO: 1634

SEQ ID NO: 10621 - protein, 342 aa, Homo sapiens; identical to SEQ ID NO: 1635

SEQ ID NO: 10622 - DNA, 1289 bp, Homo sapiens
acaaaagcaggaaaccctttgaccgggctccttcctattgcaccaacagccttgtgttgctgcaatgaaaacacttccccaagcagctgtggccaagagacgcagaaactgccttgtccacgggccccgcctcagactccaacactcacaagagagcagaggagccccaagtcttggggaccacagaagatgccatgtgctccacgatgtcggcccccacctgcctggcccacttgcctccctgcttcctgctgctggcactggtccttgtcccctcagatgcctctgggcagagcagcaggaatgactggcaggtgctacagcccgagggccccatgctggtggcagaaggagctggggaccctgaaccagacctgtggatcatccagccccaggaattggtgttggggaccactggagacactgtctttctgaactgcacagtgcttggagacggtccccctggacccatcaggtggttccagggagctggtctgagccgggaggccatttacaactttggaggcatctcccaccccaaggagacagcggtgcaggcctccaacaatgacttcagcattcttctgcaaaacgtctccagtgaggatgcaggcacctattactgtgtaaagtttcagaggaaacccaacaggcaatacctgtctggacagggcaccagcctgaaagtgaaagcaaaatctacctcttccaaagaggcagaattcaccagtgaacctgcaactgagatgtctccaacaggtgagcgtacccacctcagtggagtcaatgagtcccccacaggcaagggggccatgaatggcttggtcatgggaagggagcagtcccagactcctggggctaacctgccaccaagaatgctcccaggacttcatctcaactgcagaactaggaccccagagaaccatgttataacagctcagctataacgaactttctcatagccagggccatgtaactgtttagtgggaaatgttgtttgagaggtggtgagctccctgtgattctgagtgtagggacacactgtgaggctatgcacagcgacactggagaacatggctttgtagctaagcctcctggatggagccccttcctagtgtaatgggcaggttctcgccccttgagtctggtatctgactctatgaactagcggggaggggacaagaatcagagaccctacttcatggggttgtgtgtgcactcaaggagatcacacatgccaggtgtccagaactgtgcctagcacatctcatgttaacattcaaggactc

SEQ ID NO: 10623 - protein, 250 aa, Homo sapiens
MCSTMSAPTCLAHLPPCFLLLALVLVPSDASGQSSRNDWQVLQPEGPMLVAEGAGDPEPDLWIIQPQELVLGTTGDTVFLNCTVLGDGPPGPIRWFQGAGLSREAIYNFGGISHPKETAVQASNNDFSILLQNVSSEDAGTYYCVKFQRKPNRQYLSGQGTSLKVKAKSTSSKEAEFTSEPATEMSPTGERTHLSGVNESPTGKGAMNGLVMGREQSQTPGANLPPRMLPGLHLNCRTRTPENHVITAQL

SEQ ID NO: 10624 - DNA, 1003 bp, Homo sapiens
cccaagtcttggggaccacagaagatgccatgtgctccacgatgtcggcccccacctgcctggcccacttgcctccctgcttcctgctgctggcactggtccttgtcccctcagatgcctctgggcagagcagcaggaatgactggcaggtgctacagcccgagggccccatgctggtggcagaaggtgagacacttctactgaggtgtatggtggtcggctcctgcactgatggtatgataaaatgggtgaaggtgagcactcaggaccaacaggaaatttataactttaaacgtggctccttccctggggtaatgcccatgatccaacggacatcagaaccactgaattgtgattattccatctatatccacaatgtcaccagggactggtctgagccgggaggccatttacaactttggaggcatctcccaccccaaggagacagcggtgcaggcctccaacaatgacttcagcattcttctgcaaaacgtctccagtgaggatgcaggcacctattactgtgtaaagtttcagaggaaacccaacaggcaatacctgtctggacagggcaccagcctgaaagtgaaaggtgagacaattggttttggacttgtcgggagagcggagcaggtattcaacaggaatttttctacatgtcccgaacaagccagttcttcacagcctccatgtctttacataagtttttccctctacctggaatgctttctccttttctctgaaaactcctactcatccttcaaggcccagcacaaatggcccttcctctgtaaaaccttctcctcctctcaagcagagttaatttctccccattctggtttccacagaactctgtatagatcattaataattcaacaaacattggccaggcaccgtagttcactcttgtaatcccagcactttgggaggccaaggcaggtggatcacctgagtcaggagttcaagaccagcctgaccaacacggtgaaaccccgtctgtaat

SEQ ID NO: 10625 - protein, 178 aa, Homo sapiens [sequence omitted]

SEQ ID NO: 10626 - DNA, 950 bp, Homo sapiens
cgcagaaactgccttgtccacgggccccgcctcagactccaacactcacaagagagcagaggagccccaagtcttggggaccacagaagatgccatgtgctccacgatgtcggcccccacctgcctggcccacttgcctccctgcttcctgctgctggcactggtccttgtcccctcagatgcctctgggcagagcagcaggaatgactggcaggtgctacagcccgagggccccatgctggtggcagaaggtgagacacttctactgaggtgtatggtggtcggctcctgcactgatggtatgataaaatgggtgaaggtgagcactcaggaccaacaggaaatttataactttaaacgtggctccttccctggggtaatgcccatgatccaacggacatcagaaccactgaattgtgattattccatctatatccacaatgtcaccagggagcacactggaacctaccactgtgtgaggtttgatggtttgagtgaacactcagaaatgaaatcggatgaaggcacctcagtgcttgtgaagggtaaggatcaggccctgcagaccacacatttgctccagtctgtttccctgcacagtcacctttatccactgtatcatgctgtatcacacaaaatttcagtggcatacaacaatacatatttgtatctctacatgcacatttacatgtggctgggtggttccactcctcatgtctcatgccagagcccaggctggagaggtagcaactatgtggggcatgttttctcataaagatggcagaagcagaagcccagtcccaactcttcaagtacacctcaagcatctactcacattatgtctgctaacagcccactggctaaagcaagtcacatggctcagctccaagtcaagggacaaggaagaatagtcttccaccatgcaccaaaggtaagagtgtggatgtacc

SEQ ID NO: 10627 - protein, 226 aa, Homo sapiens
MCSTMSAPTCLAHLPPCFLLLALVLVPSDASGQSSRNDWQVLQPEGPMLVAEGETLLLRCMVVGSCTDGMIKWVKVSTQDQQEIYNFKRGSFPGVMPMIQRTSEPLNCDYSIYIHNVTREHTGTYHCVRFDGLSEHSEMKSDEGTSVLVKGKDQALQTTHLLQSVSLHSHLYPLYHAVSHKISVAYNNTYLYLYMHIYMWLGGSTPHVSCQSPGWRGSNYVGHVFS

SEQ ID NO: 10628 - DNA, 532 bp, Homo sapiens
attgctctcctgccacggaggggagcgcttggtggcagtccgcgggcccggacggaaggctgaggcgacgcctcgacgacagcggaccggagctgcaggggcaacacattcagggcggggtgccccatttaggcctggctgaccggagtaagaaactacaacccccgaagtgccttgcgcctcaaggttacggaggcagtgaccacccaccctggagccatggtccacgccttcctcattcacaccttgagggccccgaatactgaggacacgggcctttgccgagtgctgtactcctgcgtcttcggtgctgagaagtcacctgatgacccacggccgcatggtgccgagagggacaggcttctccggaaggaacagattttagctgtggccaggtgacgagccacacagtgtcctgaggcctgatgaaagggctatgccaaccacagtcccagaggaggagctggctgtagcagcgactgacccaggagctgaagtgagccaagccccctcctcctgagacccctgagag

SEQ ID NO: 10629 - protein, 59 aa, Homo sapiens
MVHAFLIHTLRAPNTEDTGLCRVLYSCVFGAEKSPDDPRPHGAERDRLLRKEQILAVAR

SEQ ID NO: 10630 - DNA, 2975 bp, Homo sapiens
acatggccaatggccgcgcgctctgcccgccccgcctcctcgctgcgggaagggtcctgggccccgggcggcggtcgccaggtctcagggccgggggtacccgagtctcgtttcctctcagtccatccacccttcatggggccagagccctctctccagaatctgagcagcaatgccgtttgctgaagacaagacctataagtatatctgccgcaatttcagcaatttttgcaatgtggatgttgtagagattctgccttacctgccctgcctcacagcaagagaccaggatcgactgcgggccacctgcacactctcagggaaccgggacaccctctggcatctcttcaatacccttcagcggcggcccggctgggtggagtacttcattgcggcactgaggggctgtgagctagttgatctcgcggacgaagtggcctctgtctaccagagctaccagcctcggacctcggaccgtcccccagacccactggagccaccgtcacttcctgctgagaggccagggccccccacacctgctgcggcccacagcatcccctacaacagctgcagagagaaggagccaagttaccccatgcctgtccaggagacccaggcgccagagtccccaggagagaattcagagcaagccctgcagacgctcagccccagagccatcccaaggaatccagatggtggccccctggagtcctcctctgacctggcagccctcagccctctgacctccagcgggcatcaggagcaggacacagaactgggcagtacccacacagcaggtgcgacctccagcctcacaccatcccgtgggcctgtgtctccatctgtctccttccagcccctggcccgttccacccccagggcaagccgcttgcctggacccacagggtcagttgtatctactggcacctccttctcctcctcatcccctggcttggcctctgcaggggctgcagagggtaaacagggtgcagagagtgaccaggccgagcctatcatctgctccagtggggcagaggcacctgccaactctctgccctccaaagtgcctaccaccttgatgcctgtgaacacagtggccctgaaagtgcctgccaacccagcatctgtcagcacagtgccctccaagttgccaactagctcaaagccccctggtgcagtgccttctaatgcgctcaccaatccagcaccatccaaattgcccatcaactcaacccgtgctggcatggtgccatccaaagtgcctactagcatggtgctcaccaaggtgtctgccagcacagtccccactgacgggagcagcagaaatgaggagaccccagcagctccaacacccgccggcgccactggaggcagctcagcctggctagacagcagctctgagaataggggccttgggtcggagctgagtaagcctggcgtgctggcatcccaggtagacagcccgttctcgggctgcttcgaggatcttgccatcagtgccagcacctccttgggcatggggccctgccatggcccagaggagaatgagtataagtccgagggcacctttgggatccacgtggctgagaaccccagcatccagctcctggagggcaaccctgggccacctgcggacccggatggcggccccaggccacaagccgaccggaagttccaggagagggaggtgccatgccacaggccctcacctggggctctgtggctccaggtggctgtgacaggggtgctggtagtcacactcctggtggtgctgtaccggcggcgtctgcactagtgaagccctgggctcttcccaccacccatctgttccgttcctgcagtacacctggcccctctccgaagccccttgtccctttcttggggattgtggaggctgggtcagaggggagttaagggactgcaggcctggcagcaggacatgccttggctgaaccaagtcctgagagcagcatctctgtccccacggtgccttgtgtgggtccccgtccttggctttctgggtcctgggctgcccccagtgctccagaccttccccactggcaatccaggttatcatccatgtcctccagaggagcttcctcctccaggcctcagccctgttggcccaggtggagcaggagggaccactggaacatgtggtgcttgggaatgcctctcctgttgcattggtccctgaaggcctcagggcaggtatgtggtgtgtgggcgactccacaagacctgcctcccatcctggcagcccagcctgagaccgttgcattgaggcaggcaggagcggcagggtggctgctctccaggagcccaactgccttgagttcctgccccactgggccccctcccctgctgggcaatcctgggaaggtctggaggttcctgtggacctcagggaagccaggggcagctgtcaggcctgaggaagacctgtggagctcctctccagcctcctctttccctcccctctggtctccattctcttcagctccctacatgggctggggaggagacacctggtgggcagagctcaggcagaggtttggatttcagctccctcacttccggggctgtgtggctttggcagatgtcagacttctggtcttgcttctccacgtggacagtgagtatctggctcattcttcactgggttcttctgagattgaacctacaggtgtttgccaagtgcctggcccagagcaagtggccactgcttctcccatctctctcctgcccaacctggtagagctgagggcatgagaggcagagtgcacagtggtcaagggtgcagctctgcagcacaggcagcctaggcctgcgtcccaacctgcctctcaccagctctgtgaccttgggcaagggatttatctgtctgtcccttagttttctcacctgtaaaaggaggataagtatatatatatatttcccagtgttgtgaagattaaaggagtttatcgatgtag

SEQ ID NO: 10631 - protein, 540 aa, Homo sapiens; identical to SEQ ID NO: 1639

SEQ ID NO: 10632 - DNA, 4692 bp, Homo sapiens
acatggccaatggccgcgcgctctgcccgccccgcctcctcgctgcgggaagggtcctgggccccgggcggcggtcgccaggtctcagggccgggggtacccgagtctcgtttcctctcagtccatccacccttcatggggccagagccctctctccagaatctgagcagcaatgccgtttgctgaagacaagacctataagtatatctgccgcaatttcagcaatttttgcaatgtggatgttgtagagattctgccttacctgccctgcctcacagcaagagaccaggatcgactgcgggccacctgcacactctcagggaaccgggacaccctctggcatctcttcaatacccttcagcggcggcccggctgggtggagtacttcattgcggcactgaggggctgtgagctagttgatctcgcggacgaagtggcctctgtctaccagagctaccagcctcggacctcggaccgtcccccagacccactggagccaccgtcacttcctgctgagaggccagggccccccacacctgctgcggcccacagcatcccctacaacagctgcagagagaaggagccaagttaccccatgcctgtccaggagacccaggcgccagagtccccaggagagaattcagagcaagccctgcagacgctcagccccagagccatcccaaggaatccagatggtggccccctggagtcctcctctgacctggcagccctcagccctctgacctccagcgggcatcaggagcaggacacagaactgggcagtacccacacagcaggtgcgacctccagcctcacaccatcccgtgggcctgtgtctccatctgtctccttccagcccctggcccgttccacccccagggcaagccgcttgcctggacccacagggtcagttgtatctactggcacctccttctcctcctcatcccctggcttggcctctgcaggggctgcagagggtaaacagggtgcagagagtgaccaggccgagcctatcatctgctccagtggggcagaggcacctgccaactctctgccctccaaagtgcctaccaccttgatgcctgtgaacacagtggccctgaaagtgcctgccaacccagcatctgtcagcacagtgccctccaagttgccaactagctcaaagccccctggtgcagtgccttctaatgcgctcaccaatccagcaccatccaaattgcccatcaactcaacccgtgctggcatggtgccatccaaagtgcctactagcatggtgctcaccaaggtgtctgccagcacagtccccactgacgggagcagcagaaatgaggagaccccagcagctccaacacccgccggcgccactggaggcagctcagcctggctagacagcagctctgagaataggggccttgggtcggagctgagtaagcctggcgtgctggcatcccaggtagacagcccgttctcgggctgcttcgaggatcttgccatcagtgccagcacctccttgggcatggggccctgccatggcccagaggagaatgagtataagtccgagggcacctttgggatccacgtggctgagaaccccagcatccagctcctggagggcaaccctgggccacctgcggacccggatggcggccccaggccacaagccgaccggaagttccaggagagggaggtgccatgccacaggccctcacctggggctctgtggctccaggtggctgtgacaggggtgctggtagtcacactcctggtggtgctgtaccggcggcgtctgcactagtgaagccctgggctcttcccaccacccatctgttccgttcctgcagtacacctggcccctctccgaagccccttgtccctttcttggggattgtggaggctgggtcagaggggagttaagggactgcaggcctggcagcaggacatgccttggctgaaccaagtcctgagagcagcatctctgtccccacggtgccttgtgtgggtccccgtccttggctttctgggtcctgggctgcccccagtgctccagaccttccccactggcaatccaggttatcatccatgtcctccagaggagcttcctcctccaggcctcagccctgttggcccaggtggagcaggagggaccactggaacatgtggtgcttgggaatgcctctcctgttgcattggtccctgaaggcctcagggcaggtatgtggtgtgtgggcgactccacaagacctgcctcccatcctggcagcccagcctgagaccgttgcattgaggcaggcaggagcggcagggtggctgctctccaggagcccaactgccttgagttcctgccccactgggccccctcccctgctgggcaatcctgggaaggtctggaggttcctgtggacctcagggaagccaggggcagctgtcaggcctgaggaagacctgtggagctcctctccagcctcctctttccctcccctctggtctccattctcttcagctccctacatgggctggggaggagacacctggtgggcagagctcaggcagaggtttggatttcagctccctcacttccggggctgtgtggctttggcagatgtcagacttctggtcttgcttctccacgtggacagtgagtatctggctcattcttcactgggttcttctgagattgaacctacaggtgtttgccaagtgcctggcccagagcaagtggccactgcttctcccatctctctcctgcccaacctggtagagctgagggcatgagaggcagagtgcacagtggtcaagggtgcagctctgcagcacaggcagcctaggcctgcgtcccaacctgcctctcaccagctctgtgaccttgggcaagggatttatctgtctgtcccttagttttctcacctgtaaaaggaggataagtatatatatatatttcccagtgttgtgaagattaaaggagtttatcgatgtaggtcttaggatgagtcctggcatttaccaagggttggatatatgttattatcactattaagtgttgagggtccaggcatgctgggcaacagggaccccatctctacaaaaaagtttaaaaaattagccaggcgtggtggtgcacctgtcgtcttagctacttgggaggctgaggtgggaggatcacttgagcccagaagcttgaagctgcagtgagctaggatcgtgccactgcactccaacctgggtgagagagcgagaccctgtctcaagaaaaagaaaaatgcagagaaacaggagtcttggctactcctttagaggcagactcagaccctcctgcctcacagctttatctttgtatttgccccttactttatcttgtgccttgagaaattgctggggagagaggtatgtccactgggcagctgtacaggatggaggatatagggcgtttccactcccagcagccaggttccctcaccccaagctcacccactgttggggagattatctacaataacaccagaaacacattggggtggattgggggtatccttatgggttcttttcagggaaccattgctggacaaggcacaggagccacctccatttctgagctctgcaagggacaagaactagagccatcaggggctgggctcactgtggccccaccccaagccgtcagcctccagggatctacaccctgccttggctgctacagctttttcactccactgccctaggggagttcagcaacctaatgatctctatctctgaacatctcttcatcccatgctccaagtccagcaacctgcaccctggaaccaggagtggaccctacccgagctgtctgtattaatccccatcccccaccaccaatcttaaaaagccctctgtccccctaccctaaaccccagttaggtacccatgctgggcaggtcagttaacaatttatgcacaggtactagttttattgtattaccgttccagggtagctttgaaaaaagtatctcaaaaaggcaacatgggccgagcgcagtggctcacgcctgtaatcccagcactttgggaggccaaggtgggcagatcgcctgaggtctggagttcaagaccagcctggccaacagggtgaaaccccgtctctacaaaaataagaaaattagccaggtgtagtggcagacgtctgtaatcccagctattcaggaggctgaggcacgagaattccatgaacccaggatgcggaggttgcagtgagccgagattgtgccactgcgctccagcctgggcgacagagtggtattctgtttcaaaaaaaaaaaaaaaggcagtatgtagccccgaagactgttgcccaagtggtagaatgttagcacactaccagcctaggtaaaaaatacaaaaagtaactgggcatggcggcgcccatctatagtcccagctacatgggaggctgaggtgggaagataagtcacttgagcccgccaggaggcggaggttgtagtgagctgagatcgcaccactgcactccagcctgggtgaccgagtgatactctgtctcaaagaaaaaaaattataattttagcacagtaaccagccatgatgggagataccctgggtaaggcatgtagaaagggttgagggaccttcccagtcccctagccccgcctcccatcctcccatctttttcttttttcttttttttagagaatcacccagcct

SEQ ID NO: 10633 - protein, 540 aa, Homo sapiens; identical to SEQ ID NO: 1639

SEQ ID NO: 10634 - DNA, 4093 bp, Homo sapiens
acatggccaatggccgcgcgctctgcccgccccgcctcctcgctgcgggaagggtcctgggccccgggcggcggtcgccaggtctcagggccgggggtacccgagtctcgtttcctctcagtccatccacccttcatggggccagagccctctctccagaatctgagcagcaatgccgtttgctgaagacaagacctataagtatatctgccgcaatttcagcaatttttgcaatgtggatgttgtagagattctgccttacctgccctgcctcacagcaagagaccaggatcgactgcgggccacctgcacactctcagggaaccgggacaccctctggcatctcttcaatacccttcagcggcggcccggctgggtggagtacttcattgcggcactgaggggctgtgagctagttgatctcgcggacgaagtggcctctgtctaccagagctaccagcctcggacctcggaccgtcccccagacccactggagccaccgtcacttcctgctgagaggccagggccccccacacctgctgcggcccacagcatcccctacaacagctgcagagagaaggagccaagttaccccatgcctgtccaggagacccaggcgccagagtccccaggagagaattcagagcaagccctgcagacgctcagccccagagccatcccaaggaatccagatggtggccccctggagtcctcctctgacctggcagccctcagccctctgacctccagcgggcatcaggagcaggacacagaactgggcagtacccacacagcaggtgcgacctccagcctcacaccatcccgtgggcctgtgtctccatctgtctccttccagcccctggcccgttccacccccagggcaagccgcttgcctggacccacagggtcagttgtatctactggcacctccttctcctcctcatcccctggcttggcctctgcaggggctgcagagggtaaacagggtgcagagagtgaccaggccgagcctatcatctgctccagtggggcagaggcacctgccaactctctgccctccaaagtgcctaccaccttgatgcctgtgaacacagtggccctgaaagtgcctgccaacccagcatctgtcagcacagtgccctccaagttgccaactagctcaaagccccctggtgcagtgccttctaatgcgctcaccaatccagcaccatccaaattgcccatcaactcaacccgtgctggcatggtgccatccaaagtgcctactagcatggtgctcaccaaggtgtctgccagcacagtccccactgacgggagcagcagaaatgaggagaccccagcagctccaacacccgccggcgccactggaggcagctcagcctggctagacagcagctctgagaataggggccttgggtcggagctgagtaagcctggcgtgctggcatcccaggtagacagcccgttctcgggctgcttcgaggatcttgccatcagtgccagcacctccttgggcatggggccctgccatggcccagaggagaatgagtataagtccgagggcacctttgggatccacgtggctgagaaccccagcatccagctcctggagggcaaccctgggccacctgcggacccggatggcggccccaggccacaagccgaccggaagttccaggagagggaggtgccatgccacaggccctcacctggggctctgtggctccaggtggctgtgacaggggtgctggtagtcacactcctggtggtgctgtaccggcggcgtctgcactagtgaagccctgggctcttcccaccacccatctgttccgttcctgcagtacacctggcccctctccgaacctcctctttccctcccctctggtctccattctcttcagctccctacatgggctggggaggagacacctggtgggcagagctcaggcagaggtttggatttcagctccctcacttccggggctgtgtggctttggcagatgtcagacttctggtcttgcttctccacgtggacagtgagtatctggctcattcttcactgggttcttctgagattgaacctacaggtgtttgccaagtgcctggcccagagcaagtggccactgcttctcccatctctctcctgcccaacctggtagagctgagggcatgagaggcagagtgcacagtggtcaagggtgcagctctgcagcacaggcagcctaggcctgcgtcccaacctgcctctcaccagctctgtgaccttgggcaagggatttatctgtctgtcccttagttttctcacctgtaaaaggaggataagtatatatatatatttcccagtgttgtgaagattaaaggagtttatcgatgtaggtcttaggatgagtcctggcatttaccaagggttggatatatgttattatcactattaagtgttgagggtccaggcatgctgggcaacagggaccccatctctacaaaaaagtttaaaaaattagccaggcgtggtggtgcacctgtcgtcttagctacttgggaggctgaggtgggaggatcacttgagcccagaagcttgaagctgcagtgagctaggatcgtgccactgcactccaacctgggtgagagagcgagaccctgtctcaagaaaaagaaaaatgcagagaaacaggagtcttggctactcctttagaggcagactcagaccctcctgcctcacagctttatctttgtatttgccccttactttatcttgtgccttgagaaattgctggggagagaggtatgtccactgggcagctgtacaggatggaggatatagggcgtttccactcccagcagccaggttccctcaccccaagctcacccactgttggggagattatctacaataacaccagaaacacattggggtggattgggggtatccttatgggttcttttcagggaaccattgctggacaaggcacaggagccacctccatttctgagctctgcaagggacaagaactagagccatcaggggctgggctcactgtggccccaccccaagccgtcagcctccagggatctacaccctgccttggctgctacagctttttcactccactgccctaggggagttcagcaacctaatgatctctatctctgaacatctcttcatcccatgctccaagtccagcaacctgcaccctggaaccaggagtggaccctacccgagctgtctgtattaatccccatcccccaccaccaatcttaaaaagccctctgtccccctaccctaaaccccagttaggtacccatgctgggcaggtcagttaacaatttatgcacaggtactagttttattgtattaccgttccagggtagctttgaaaaaagtatctcaaaaaggcaacatgggccgagcgcagtggctcacgcctgtaatcccagcactttgggaggccaaggtgggcagatcgcctgaggtctggagttcaagaccagcctggccaacagggtgaaaccccgtctctacaaaaataagaaaattagccaggtgtagtggcagacgtctgtaatcccagctattcaggaggctgaggcacgagaattccatgaacccaggatgcggaggttgcagtgagccgagattgtgccactgcgctccagcctgggcgacagagtggtattctgtttcaaaaaaaaaaaaaaaggcagtatgtagccccgaagactgttgcccaagtggtagaatgttagcacactaccagcctaggtaaaaaatacaaaaagtaactgggcatggcggcgcccatctatagtcccagctacatgggaggctgaggtgggaagataagtcacttgagcccgccaggaggcggaggttgtagtgagctgagatcgcaccactgcactccagcctgggtgaccgagtgatactctgtctcaaagaaaaaaaattataattttagcacagtaaccagccatgatgggagataccctgggtaaggcatgtagaaagggttgagggaccttcccagtcccctagccccgcctcccatcctcccatctttttcttttttcttttttttagagaatcacccagcct

SEQ ID NO: 10635 - protein, 540 aa, Homo sapiens; identical to SEQ ID NO: 1639

SEQ ID NO: 10636 - DNA, 4482 bp, Homo sapiens
ctcctcgctgcgggaagggtcctgggccccgggcggcggtcgccaggtctcagggccgggggtacccgagtctcgtttcctctcagtccatccacccttcatggggccagagccctctctccagaatctgagcagcaatgccgtttgctgaagacaagacctataagtatatctgccgcaatttcagcaatttttgcaatgtggatgttgtagagattctgccttacctgccctgcctcacagcaagagaccagggacctcggaccgtcccccagacccactggagccaccgtcacttcctgctgagaggccagggccccccacacctgctgcggcccacagcatcccctacaacagctgcagagagaaggagccaagttaccccatgcctgtccaggagacccaggcgccagagtccccaggagagaattcagagcaagccctgcagacgctcagccccagagccatcccaaggaatccagatggtggccccctggagtcctcctctgacctggcagccctcagccctctgacctccagcgggcatcaggagcaggacacagaactgggcagtacccacacagcaggtgcgacctccagcctcacaccatcccgtgggcctgtgtctccatctgtctccttccagcccctggcccgttccacccccagggcaagccgcttgcctggacccacagggtcagttgtatctactggcacctccttctcctcctcatcccctggcttggcctctgcaggggctgcagagggtaaacagggtgcagagagtgaccaggccgagcctatcatctgctccagtggggcagaggcacctgccaactctctgccctccaaagtgcctaccaccttgatgcctgtgaacacagtggccctgaaagtgcctgccaacccagcatctgtcagcacagtgccctccaagttgccaactagctcaaagccccctggtgcagtgccttctaatgcgctcaccaatccagcaccatccaaattgcccatcaactcaacccgtgctggcatggtgccatccaaagtgcctactagcatggtgctcaccaaggtgtctgccagcacagtccccactgacgggagcagcagaaatgaggagaccccagcagctccaacacccgccggcgccactggaggcagctcagcctggctagacagcagctctgagaataggggccttgggtcggagctgagtaagcctggcgtgctggcatcccaggtagacagcccgttctcgggctgcttcgaggatcttgccatcagtgccagcacctccttgggcatggggccctgccatggcccagaggagaatgagtataagtccgagggcacctttgggatccacgtggctgagaaccccagcatccagctcctggagggcaaccctgggccacctgcggacccggatggcggccccaggccacaagccgaccggaagttccaggagagggaggtgccatgccacaggccctcacctggggctctgtggctccaggtggctgtgacaggggtgctggtagtcacactcctggtggtgctgtaccggcggcgtctgcactagtgaagccctgggctcttcccaccacccatctgttccgttcctgcagtacacctggcccctctccgaagccccttgtccctttcttggggattgtggaggctgggtcagaggggagttaagggactgcaggcctggcagcaggacatgccttggctgaaccaagtcctgagagcagcatctctgtccccacggtgccttgtgtgggtccccgtccttggctttctgggtcctgggctgcccccagtgctccagaccttccccactggcaatccaggttatcatccatgtcctccagaggagcttcctcctccaggcctcagccctgttggcccaggtggagcaggagggaccactggaacatgtggtgcttgggaatgcctctcctgttgcattggtccctgaaggcctcagggcaggtatgtggtgtgtgggcgactccacaagacctgcctcccatcctggcagcccagcctgagaccgttgcattgaggcaggcaggagcggcagggtggctgctctccaggagcccaactgccttgagttcctgccccactgggccccctcccctgctgggcaatcctgggaaggtctggaggttcctgtggacctcagggaagccaggggcagctgtcaggcctgaggaagacctgtggagctcctctccagcctcctctttccctcccctctggtctccattctcttcagctccctacatgggctggggaggagacacctggtgggcagagctcaggcagaggtttggatttcagctccctcacttccggggctgtgtggctttggcagatgtcagacttctggtcttgcttctccacgtggacagtgagtatctggctcattcttcactgggttcttctgagattgaacctacaggtgtttgccaagtgcctggcccagagcaagtggccactgcttctcccatctctctcctgcccaacctggtagagctgagggcatgagaggcagagtgcacagtggtcaagggtgcagctctgcagcacaggcagcctaggcctgcgtcccaacctgcctctcaccagctctgtgaccttgggcaagggatttatctgtctgtcccttagttttctcacctgtaaaaggaggataagtatatatatatatttcccagtgttgtgaagattaaaggagtttatcgatgtaggtcttaggatgagtcctggcatttaccaagggttggatatatgttattatcactattaagtgttgagggtccaggcatgctgggcaacagggaccccatctctacaaaaaagtttaaaaaattagccaggcgtggtggtgcacctgtcgtcttagctacttgggaggctgaggtgggaggatcacttgagcccagaagcttgaagctgcagtgagctaggatcgtgccactgcactccaacctgggtgagagagcgagaccctgtctcaagaaaaagaaaaatgcagagaaacaggagtcttggctactcctttagaggcagactcagaccctcctgcctcacagctttatctttgtatttgccccttactttatcttgtgccttgagaaattgctggggagagaggtatgtccactgggcagctgtacaggatggaggatatagggcgtttccactcccagcagccaggttccctcaccccaagctcacccactgttggggagattatctacaataacaccagaaacacattggggtggattgggggtatccttatgggttcttttcagggaaccattgctggacaaggcacaggagccacctccatttctgagctctgcaagggacaagaactagagccatcaggggctgggctcactgtggccccaccccaagccgtcagcctccagggatctacaccctgccttggctgctacagctttttcactccactgccctaggggagttcagcaacctaatgatctctatctctgaacatctcttcatcccatgctccaagtccagcaacctgcaccctggaaccaggagtggaccctacccgagctgtctgtattaatccccatcccccaccaccaatcttaaaaagccctctgtccccctaccctaaaccccagttaggtacccatgctgggcaggtcagttaacaatttatgcacaggtactagttttattgtattaccgttccagggtagctttgaaaaaagtatctcaaaaaggcaacatgggccgagcgcagtggctcacgcctgtaatcccagcactttgggaggccaaggtgggcagatcgcctgaggtctggagttcaagaccagcctggccaacagggtgaaaccccgtctctacaaaaataagaaaattagccaggtgtagtggcagacgtctgtaatcccagctattcaggaggctgaggcacgagaattccatgaacccaggatgcggaggttgcagtgagccgagattgtgccactgcgctccagcctgggcgacagagtggtattctgtttcaaaaaaaaaaaaaaaggcagtatgtagccccgaagactgttgcccaagtggtagaatgttagcacactaccagcctaggtaaaaaatacaaaaagtaactgggcatggcggcgcccatctatagtcccagctacatgggaggctgaggtgggaagataagtcacttgagcccgccaggaggcggaggttgtagtgagctgagatcgcaccactgcactccagcctgggtgaccgagtgatactctgtctcaaagaaaaaaaattataattttagcacagtaaccagccatgatgggagataccctgggtaaggcatgtagaaagggttgagggaccttcccagtcccctagccccgcctcccatcctcccatctttttcttttttcttttttttagagaatcacccagcct

SEQ ID NO: 10637 - protein, 399 aa, Homo sapiens
MPVQETQAPESPGENSEQALQTLSPRAIPRNPDGGPLESSSDLAALSPLTSSGHQEQDTELGSTHTAGATSSLTPSRGPVSPSVSFQPLARSTPRASRLPGPTGSVVSTGTSFSSSSPGLASAGAAEGKQGAESDQAEPIICSSGAEAPANSLPSKVPTTLMPVNTVALKVPANPASVSTVPSKLPTSSKPPGAVPSNALTNPAPSKLPINSTRAGMVPSKVPTSMVLTKVSASTVPTDGSSRNEETPAAPTPAGATGGSSAWLDSSSENRGLGSELSKPGVLASQVDSPFSGCFEDLAISASTSLGMGPCHGPEENEYKSEGTFGIHVAENPSIQLLEGNPGPPADPDGGPRPQADRKFQEREVPCHRPSPGALWLQVAVTGVLVVTLLVVLYRRRLH

SEQ ID NO: 10638 - DNA, 2513 bp, Homo sapiens
tcgctgcgggaagggtcctgggccccgggcggcggtcgccaggtctcagggccgggggtacccgagtctcgtttcctctcagtccatccacccttcatggggccagagccctctctccagaatctgagcagcaatgccgtttgctgaagacaagacctataagtatatctgccgcaatttcagcaatttttgcaatgtggatgttgtagagattctgccttacctgccctgcctcacagcaagagaccaggatcgactgcgggccacctgcacactctcagggaaccgggacaccctctggcatctcttcaatacccttcactccctacatgggctggggaggagacacctggtgggcagagctcaggcagaggtttggatttcagctccctcacttccggggctgtgtggctttggcagatgtcagacttctggtcttgcttctccacgtggacagtgagtatctggctcattcttcactgggttcttctgagattgaacctacaggtgtttgccaagtgcctggcccagagcaagtggccactgcttctcccatctctctcctgcccaacctggtagagctgagggcatgagaggcagagtgcacagtggtcaagggtgcagctctgcagcacaggcagcctaggcctgcgtcccaacctgcctctcaccagctctgtgaccttgggcaagggatttatctgtctgtcccttagttttctcacctgtaaaaggaggataagtatatatatatatttcccagtgttgtgaagattaaaggagtttatcgatgtaggtcttaggatgagtcctggcatttaccaagggttggatatatgttattatcactattaagtgttgagggtccaggcatgctgggcaacagggaccccatctctacaaaaaagtttaaaaaattagccaggcgtggtggtgcacctgtcgtcttagctacttgggaggctgaggtgggaggatcacttgagcccagaagcttgaagctgcagtgagctaggatcgtgccactgcactccaacctgggtgagagagcgagaccctgtctcaagaaaaagaaaaatgcagagaaacaggagtcttggctactcctttagaggcagactcagaccctcctgcctcacagctttatctttgtatttgccccttactttatcttgtgccttgagaaattgctggggagagaggtatgtccactgggcagctgtacaggatggaggatatagggcgtttccactcccagcagccaggttccctcaccccaagctcacccactgttggggagattatctacaataacaccagaaacacattggggtggattgggggtatccttatgggttcttttcagggaaccattgctggacaaggcacaggagccacctccatttctgagctctgcaagggacaagaactagagccatcaggggctgggctcactgtggccccaccccaagccgtcagcctccagggatctacaccctgccttggctgctacagctttttcactccactgccctaggggagttcagcaacctaatgatctctatctctgaacatctcttcatcccatgctccaagtccagcaacctgcaccctggaaccaggagtggaccctacccgagctgtctgtattaatccccatcccccaccaccaatcttaaaaagccctctgtccccctaccctaaaccccagttaggtacccatgctgggcaggtcagttaacaatttatgcacaggtactagttttattgtattaccgttccagggtagctttgaaaaaagtatctcaaaaaggcaacatgggccgagcgcagtggctcacgcctgtaatcccagcactttgggaggccaaggtgggcagatcgcctgaggtctggagttcaagaccagcctggccaacagggtgaaaccccgtctctacaaaaataagaaaattagccaggtgtagtggcagacgtctgtaatcccagctattcaggaggctgaggcacgagaattccatgaacccaggatgcggaggttgcagtgagccgagattgtgccactgcgctccagcctgggcgacagagtggtattctgtttcaaaaaaaaaaaaaaaggcagtatgtagccccgaagactgttgcccaagtggtagaatgttagcacactaccagcctaggtaaaaaatacaaaaagtaactgggcatggcggcgcccatctatagtcccagctacatgggaggctgaggtgggaagataagtcacttgagcccgccaggaggcggaggttgtagtgagctgagatcgcaccactgcactccagcctgggtgaccgagtgatactctgtctcaaagaaaaaaaattataattttagcacagtaaccagccatgatgggagataccctgggtaaggcatgtagaaagggttgagggaccttcccagtcccctagccccgcctcccatcctcccatctttttcttttttcttttttttagagaatcacccagcct

SEQ ID NO: 10639 - protein, 108 aa, Homo sapiens
MPFAEDKTYKYICRNFSNFCNVDVVEILPYLPCLTARDQDRLRATCTLSGNRDTLWHLFNTLHSLHGLGRRHLVGRAQAEVWISAPSLPGLCGFGRCQTSGLASPRGQ

SEQ ID NO: 10640 - DNA, 497 bp, Homo sapiens
tcctgggccccgggcggcggtcgccaggtctcagggccgggggtacccgagtctcgtttcctctcagtccatccacccttcatggggccagagccctctctccagaatctgagcagcaatgccgtttgctgaagacaagacctataagtatatctgccgcaatttcagcaatttttgcaatgtggatgttgtagagattctgccttacctgccctgcctcacagcaagagaccaggatcgactgcgggccacctgcacactctcagggaaccgggacaccctctggcatctcttcaatacccttcagcggcggcccggctgggtggagtacttcattgcggcactgaggggctgtgagctagttgatctcgcggacgaagtggcctctgtctaccagagctaccagcctcaattcagagcaagccctgcagacgctcagccccagagccatcccaaggaatccagatggtggccccctggagtcctcctctgacctg

SEQ ID NO: 10641 - protein, 124 aa, Homo sapiens
MPFAEDKTYKYICRNFSNFCNVDVVEILPYLPCLTARDQDRLRATCTLSGNRDTLWHLFNTLQRRPGWVEYFIAALRGCELVDLADEVASVYQSYQPQFRASPADAQPQSHPKESRWWPPGVLL

SEQ ID NO: 10642 - DNA, 438 bp, Homo sapiens
gggacgggagagggtttctggaaggctcaatgggcagaagtgggcagataggaacacaaaagtggtggctcaaggtagactatgaggacagacctctcctggggactctggcgcctgggtctcctggacaggcatggggtaacttggctccttctctctgcagctgttgtaggggatgctgtgggccgcagcaggtgtggggggccctggcctctcagcaggaagtgacggtggctccagtgggtctgggggacggtccgaggtccctagaggacaaagatgtagtgatatcaagaaggaatcagggctgggcacagtggctcatgcctgtaatctcagcactttgggaggccaaggcaggcagatcacgagaacctgggagacggaggttgcagtgagctgagatcgcgccactgcactccagcctgggcaacagag

SEQ ID NO: 10643 - protein, 122 aa, Homo sapiens
MGRSGQIGTQKWWLKVDYEDRPLLGTLAPGSPGQAWGNLAPSLCSCCRGCCGPQQVWGALASQQEVTVAPVGLGDGPRSLEDKDVVISRRNQGWAQWLMPVISALWEAKAGRSREPGRRRLQ

SEQ ID NO: 10644 - DNA, 1493 bp, Homo sapiens
gttcttctgagattgaacctacaggtgtttgccaagtgcctggcccagagcaagtggccactgcttctcccatctctctcctgcccaacctggtagagctgagggcatgagaggcagagtgcacagtggtcaagggtgcagctctgcagcacaggcagcctaggcctgcgtcccaacctgcctctcaccagctctgtgaccttgggcaagggatttatctgtctgtcccttagttttctcacctgtaaaaggaggataagtatatatatatatttcccagtgttgtgaagattaaaggagtttatcgatgtaggtcttaggatgagtcctggcatttaccaagggttggatatatgttattatcactattaagtgttgagggtccaggcatgctgggcaacagggaccccatctctacaaaaaagtttaaaaaattagccaggcgtggtggtgcacctgtcgtcttagctacttgggaggctgaggtgggaggatcacttgagcccagaagcttgaagctgcagtgagctaggatcgtgccactgcactccaacctgggtgagagagcgagaccctgtctcaagaaaaagaaaaatgcagagaaacaggagtcttggctactcctttagaggcagactcagaccctcctgcctcacagctttatctttgtatttgccccttactttatcttgtgccttgagaaattgctggggagagaggtatgtccactgggcagctgtacaggatggaggatatagggcgtttccactcccagcagccaggttccctcaccccaagctcacccactgttggggagattatctacaataacaccagaaacacattggggtggattgggggtatccttatgggttcttttcagggaaccattgctggacaaggcacaggagccacctccatttctgagctctgcaagggacaagaactagagccatcaggggctgggctcactgtggccccaccccaagccgtcagcctccagggatctacaccctgccttggctgctacagctttttcactccactgccctaggggagttcagcaacctaatgatctctatctctgaacatctcttcatcccatgctccaagtccagcaactgcactccagcctgggtgacagagcgagactccatctcaaaaaaataataaagatgtggggcctgtgggaggtggttaggtcatgagggtggagatcatgaatggggttagcaccttataaaacaggcttgagggagcccttctgtcccttctaccatgtgtggatgcagtgagaaggcaccgtatctctgaagcagagagcccgccctggacactggatctgctggcaccttgatcttggacttcccagcctctagaactgtgagaaataattttttgttgtttacaaattacccaggctaaggtgtttcattgtaacctgaatggaccaagctggtgtgaccctgttggaaaactggcagtatctacca

SEQ ID NO: 10645 - protein, 34 aa, Homo sapiens
MLQVQQLHSSLGDRARLHLKKIIKMWGLWEVVRS

SEQ ID NO: 10646 - DNA, 4524 bp, Homo sapiens
gcactccaacctgggtgagagagcgagaccctgtctcaagaaaaagaaaaatgcagagaaacaggagtcttggctactcctttagaggcagactcagaccctcctgcctcacagctttatctttgtatttgccccttactttatcttgtgccttgagaaattgctggggagagaggtatgtccactgggcagctgtacaggatggaggatatagggcgtttccactcccagcagccaggttccctcaccccaagctcacccactgttggggagattatctacaataacaccagaaacacattggggtggattgggggtatccttatgggttcttttcagggaaccattgctggacaaggcacaggagccacctccatttctgagctctgcaagggacaagaactagagccatcaggggctgggctcactgtggccccaccccaagccgtcagcctccagggatctacaccctgccttggctgctacagctttttcactccactgccctaggggagttcagcaacctaatgatctctatctctgaacatctcttcatcccatgctccaagtccagcaacctgcaccctggaaccaggagtggaccctacccgagctgtctgtattaatccccatcccccaccaccaatcttaaaaagccctctgtccccctaccctaaaccccagttaggtacccatgctgggcaggtcagttaacaatttatgcacaggtactagttttattgtattaccgttccagggtagctttgaaaaaagtatctcaaaaaggcaacatatcccagcacttttcaaatgatgccgctcaaagccgtgacttggcctactttgaacagcaaacttgttgctgctgttgtcaacctgaaggcctctcaaatgccagcttcaagcagggtgtgaattggccagtgtcagatctcaggagtcctgtgttgagagtgtggctttcagctgcggggagctgcacttggtggggaaagccaggcaggtcaccctcacagccagataatgtggaggtcagaacccaaggaagggagtgagacctccactcccagtgggggacctggccacccatccttggggacctgagaaagcgtacttcaccttggggtgaaggctgggtggggccagagggaccagtgccctcctcagtgcttaggggcagagccacctgcagcaatggtatctgcatattagcccctctccaccttctttctcccgctgaatcatttccctcaaagcccaagagctgtcactgcttctttctccctgggaagaatgcgtggactctgcctggtgatagactgaagccagaacagtgccacaccctcgccttaattccttgctaggtgttctcagatttatgagacttcttagtcaaatatgagggaggttggatgtggtggcttgtgcctgtaatcccagcattttgggaagccgaggtgggaggatcccttgaagccaggagtttgagacaagcctgggcaacaaagcaagaccctatctctaaaaaaaaaaaaaaaaaaaaaaaaaaaaaaaaaaaaaaaaaatctaggagatgctctttaccctgcctggcctcaaactattaatagcttcctttgagcaacattatttattatgaactttcaaacacaaaaaagtagagagagtagaataacaaatccccatgagcccatcacccaacttcagtaattatcaattcatggccatcttgttcacccctgcctgcttccctgcttcccctcattctgcagaggttcttttcttttgagacagagtgttgctctgttgcccaggctggagtgcagtggtgcaacttcggctcactgcaacctccgcctcccaggttcaagtgattctcctgcttcagcctctcaagtagctgggattacagatgcccgccaccacacctggctaattttcgtatttttgttagagatggggtttcaccatgttggccaggctggtctcgaactcctgacctcaagtgatccgcccgccttggcctcccaaaatgctgggattacaggtgtgaaccacggtgcctggccactgtacaggttatttatagaagttggagagtgaagggttgagaaagccaaggggcagatgcgggtctggaggattttgtgcctaaggccctctctttgctcccagacagcatgaagtaacaatgaggcatccacctcttggttttgtggcctctgtggatgacgtctctcaccttgaaccagttcagagttggagtagcgcaggatcctgtcttcagaggaggggccgaagcgggttcctctgttgtcaagctctttggaggtgcctggctgctactactgtcccagagaggtgatgatgaatgatgggtgtgtccagtggcagtttgccccactgaggcaggggcttccactaggccctgacagagcccttccagcaggcagaaatccctgtgctaggcaagattcaaactccgtagcatgtctcctgctcccatctcttaggaatggagtccttcaggccttgagtcccacattttccatgatgctccattaagcagctgatagcacccccacctccagggaaagtgagttcagagtccttggtctaatgcatctgtgttgaaattgaggccttcccctgtgttcacctttctgctctttttcttttagcccaaggctatgaaggcctcattcggtgctgggcatggtcactcctagcattcctcactctgttgctaacagcaacagcaataataataagggttacaacttactccataccttactgtctgccaggcattaagctaagtgctttacatatattaagtcatttaatcctcataatgaccctatgaaagagataccatctcaacccaattgacagctggtttgcaagattaggagggatgaaggacccaggggacaatgcgagggaaaactctgaccccggggccccaggctggatgttctttatgcctgtgaaccacagcttatcacatgtctggagttagggaccccacttaaagtgagattttggctggaggtggtggatcatacctataatcccagcactttgggagaccaaggcagaaggactgcttgaggccaggagttcaaaaccagtgtaggtaacagctagaccctatctctacaaaaaatttaaaaattagctgggtgtggtggtatgtgcctcaagttccagctactcaggaggctgaggtgggaggatcacttgagcacaggagtttgaagttacagtgagctatgatggcaccactgcacttcagcctaggcaacagagggagaccctgtctttaaagtacatagaggtttttcacaccaacacatctctgcccagtgtgccaacatctgccacctgctataatagtactataacactcaatatgtaattaatgtagtctcagggatgttatgacaatatgattacaactatcacgtgtgtgcccagccaggctcaatgccccaggctgggcgaggtggggcaggggacacagcctaaaatgccaggcctcaggaagccatttggtttagcagacattgtttattaaaggagttacctatgccagatcgaaggcctaagatgattaagacactatgagtgccttcaagtggttggggacgttcatgattgtggtacagacaaataggctttcacatcattcttttatgtaatcatacaacagatatttgcacctacatgtgcagagcactgtgataggcctcagtgacacagaataatacggcaaagaccccacccgatgagccccctcccaccacccaccagtacagtagggggtggtttaatggagtgttcctggaatatgaagtgggggcaggcattaggggtggcaaagggacaagtgtttatctgatcagttatgtactgtttataataagtaaatcagcagagggggaataatacttagaacctatagagagtaaatctgacaagatgaaatgctgatgaaaatatggaggaaatgaaactctcatgggttttgcagggaatctaagtcagtgctgtgttgtgaatgtaggtgtaccctttgaattcatatgttgaatcctaacccccaaagcaatggcattaagaggtggggcctttggggctgggtatggtggctcatgactgtaatcccagcactttgggatgctggcagggggcagatcacttgaagccaggagtctgagatcagcctggccaacatggtgaaaccccatctgtactaaaaatacaaaaattagccaggtgtgatggcgtacatctgtaatttcagccactcgggaggctgagacaggagaatagcttgaacccagtaggtggagatttcagtgagccgagatcgtgccactgcactccagcctgggtgacagagcgagactccatctcaaaaaaataataaagatgtggggcctgtgggaggtggttaggtcatgagggtggagatcatgaatggggttagcaccttataaaacaggcttgagggagccc

SEQ ID NO: 10647 - protein, 39 aa, Homo sapiens [sequence omitted]

SEQ ID NO: 10648 - DNA, 932 bp, Homo sapiens
actttatcttgtgccttgagaaattgctggggagagaggtatgtccactgggcagctgtacaggatggaggatatagggcgtttccactcccagcagccaggttccctcaccccaagctcacccacccagttaggtacccatgctgggcaggtcagttaacaatttatgcacaggtactagttttattgtattaccgttccagggtagctttgaaaaaagtatctcaaaaaggcaacatgggccgagcgcagtggctcacgcctgtaatcccagcactttgggaggccaaggtgggcagatcgcctgaggtctggagttcaagaccagcctggccaacagggtgaaaccccgtctctacaaaaataagaaaattagccaggtgtagtggcagacgtctgtaatcccagctattcaggaggctgaggcacgagaattccatgaacccaggatgcggaggttgcagtgagccgagattgtgccactgcgctccagcctgggcgacagagtggtattctgtttcaaaaaaaaaaaaaaaggcagtatgtagccccgaagactgttgcccaagtggtagaatgttagcacactaccagcctaggtaaaaaatacaaaaagtaactgggcatggcggcgcccatctatagtcccagctacatgggaggctgaggtgggaagataagtcacttgagcccgccaggaggcggaggttgtagtgagctgagatcgcaccactgcactccagcctgggtgaccgagtgatactctgtctcaaagaaaaaaaattataattttagcacagtaaccagccatgatgggagataccctgggtaaggcatgtagaaagggttgagggaccttcccagtcccctagccccgcctcccatcctcccatctttttcttttttcttttttttagagaatcacccagcct

SEQ ID NO: 10649 - protein, 39 aa, Homo sapiens
MSTGQLYRMEDIGRFHSQQPGSLTPSSPTQLGTHAGQVS

SEQ ID NO: 10650 - DNA, 770 bp, Homo sapiens
ctggcttcagtctatcaccaggcagagtccacgcattcttcccagggagaaagaagcagtgacagctcttgggctttgagggaaatgattcagcgggagaaagaaggtggagaggggctaatatgcagataccattgctgcaggtggctctgcccctaagcactgaggagggcactggtccctctggccccacccagccttcaccccaaggtgaagtacgctttctcaggtccccaaggatgggtggccaggtcccccactgggagtggaggtctcactcccttccttgggttctgacctccacattatctggctgtgagggtgacctgcctggctttccccaccaagtgcagctccccgcagctgaaagccacactctcaacacaggactcctgagatctgacactggccaattcacaccctgcttgaagctggcatttgagaggccttcaggttgacaacagcagcaacaagtttgctgttcaaagtaggccaagtcacggctttgagcggcatcatttgaaaagtgctgggatcagccaggcgcagtggctcactcctgtatcccagcactttgggaagccaacgcaggtggagcacttgaggtcaggagttcaagaacagcctggccaacatggagaaaccccgtctctactaaaaatacgaaaattagtcgggtgtggtggcaggcctctgtaatcccagctactcgggaggctgaggtggaggtcgcagtgagctgagatcgcgccactgcactccagcctggg

SEQ ID NO: 10651 - protein, 111 aa, Homo sapiens [sequence omitted]

SEQ ID NO: 10652 - DNA, 3778 bp, Homo sapiens
gcctcccaaagtgctgggattacaggctgagccactgcgcctggctgatcccagcacttttcaaatgatgccgctcaaagccgtgacttggcctactttgaacagcaaacttgttgctgctgttgtcaacctgaaggcctctcaaatgccagcttcaagcagggtgtgaattggccagtgtcagatctcaggagtcctgtgttgagagtgtggctttcagctgcggggagctgcacttggtggggaaagccaggcaggtcaccctcacagccagataatgtggaggtcagaacccaaggaagggagtgagacctccactcccagtgggggacctggccacccatccttggggacctgagaaagcgtacttcaccttggggtgaaggctgggtggggccagagggaccagtgccctcctcagtgcttaggggcagagccacctgcagcaatggtatctgcatattagcccctctccaccttctttctcccgctgaatcatttccctcaaagcccaagagctgtcactgcttctttctccctgggaagaatgcgtggactctgcctggtgatagactgaagccagaacagtgccacaccctcgccttaattccttgctaggtgttctcagatttatgagacttcttagtcaaatatgagggaggttggatgtggtggcttgtgcctgtaatcccagcattttgggaagccgaggtgggaggatcccttgaagccaggagtttgagacaagcctgggcaacaaagcaagaccctatctctaaaaaaaaaaaaaaaaaaaaaaaaaaaaaaaaaaaaaaaaaatctaggagatgctctttaccctgcctggcctcaaactattaatagcttcctttgagcaacattatttattatgaactttcaaacacaaaaaagtagagagagtagaataacaaatccccatgagcccatcacccaacttcagtaattatcaattcatggccatcttgttcacccctgcctgcttccctgcttcccctcattctgcagaggttcttttcttttgagacagagtgttgctctgttgcccaggctggagtgcagtggtgcaacttcggctcactgcaacctccgcctcccaggttcaagtgattctcctgcttcagcctctcaagtagctgggattacagatgcccgccaccacacctggctaattttcgtatttttgttagagatggggtttcaccatgttggccaggctggtctcgaactcctgacctcaagtgatccgcccgccttggcctcccaaaatgctgggattacaggtgtgaaccacggtgcctggccactgtacaggttatttatagaagttggagagtgaagggttgagaaagccaaggggcagatgcgggtctggaggattttgtgcctaaggccctctctttgctcccagacagcatgaagtaacaatgaggcatccacctcttggttttgtggcctctgtggatgacgtctctcaccttgaaccagttcagagttggagtagcgcaggatcctgtcttcagaggaggggccgaagcgggttcctctgttgtcaagctctttggaggtgcctggctgctactactgtcccagagaggtgatgatgaatgatgggtgtgtccagtggcagtttgccccactgaggcaggggcttccactaggccctgacagagcccttccagcaggcagaaatccctgtgctaggcaagattcaaactccgtagcatgtctcctgctcccatctcttaggaatggagtccttcaggccttgagtcccacattttccatgatgctccattaagcagctgatagcacccccacctccagggaaagtgagttcagagtccttggtctaatgcatctgtgttgaaattgaggccttcccctgtgttcacctttctgctctttttcttttagcccaaggctatgaaggcctcattcggtgctgggcatggtcactcctagcattcctcactctgttgctaacagcaacagcaataataataagggttacaacttactccataccttactgtctgccaggcattaagctaagtgctttacatatattaagtcatttaatcctcataatgaccctatgaaagagataccatctcaacccaattgacagctggtttgcaagattaggagggatgaaggacccaggggacaatgcgagggaaaactctgaccccggggccccaggctggatgttctttatgcctgtgaaccacagcttatcacatgtctggagttagggaccccacttaaagtgagattttggctggaggtggtggatcatacctataatcccagcactttgggagaccaaggcagaaggactgcttgaggccaggagttcaaaaccagtgtaggtaacagctagaccctatctctacaaaaaatttaaaaattagctgggtgtggtggtatgtgcctcaagttccagctactcaggaggctgaggtgggaggatcacttgagcacaggagtttgaagttacagtgagctatgatggcaccactgcacttcagcctaggcaacagagggagaccctgtctttaaagtacatagaggtttttcacaccaacacatctctgcccagtgtgccaacatctgccacctgctataatagtactataacactcaatatgtaattaatgtagtctcagggatgttatgacaatatgattacaactatcacgtgtgtgcccagccaggctcaatgccccaggctgggcgaggtggggcaggggacacagcctaaaatgccaggcctcaggaagccatttggtttagcagacattgtttattaaaggagttacctatgccagatcgaaggcctaagatgattaagacactatgagtgccttcaagtggttggggacgttcatgattgtggtacagacaaataggctttcacatcattcttttatgtaatcatacaacagatatttgcacctacatgtgcagagcactgtgataggcctcagtgacacagaataatacggcaaagaccccacccgatgagccccctcccaccacccaccagtacagtagggggtggtttaatggagtgttcctggaatatgaagtgggggcaggcattaggggtggcaaagggacaagtgtttatctgatcagttatgtactgtttataataagtaaatcagcagagggggaataatacttagaacctatagagagtaaatctgacaagatgaaatgctgatgaaaatatggaggaaatgaaactctcatgggttttgcagggaatctaagtcagtgctgtgttgtgaatgtaggtgtaccctttgaattcatatgttgaatcctaacccccaaagcaatggcattaagaggtggggcctttggggctgggtatggtggctcatgactgtaatcccagcactttgggatgctggcagggggcagatcacttgaagccaggagtctgagatcagcctggccaacatggtgaaaccccatctgtactaaaaatacaaaaattagccaggtgtgatggcgtacatctgtaatttcagccactcgggaggctgagacaggagaatagcttgaacccagtaggtggagatttcagtgagccgagatcgtgccactgcactccagcctgggtgacagagcgagactccatctcaaaaaaataataaagatgtggggcctgtgggaggtggttaggtcatgagggtggagatcatgaatggggttagcaccttataaaacaggcttgagggagccc

SEQ ID NO: 10653 - protein, 66 aa, Homo sapiens
MMNDGCVQWQFAPLRQGLPLGPDRALPAGRNPCARQDSNSVACLLLPSLRNGVLQALSPTFSMMLH

SEQ ID NO: 10654 - DNA, 3975 bp, Homo sapiens
gctgggattacagatgtgagacactgcacccaaaccccaccacttttttttttcctttttctttttttgagacagtcttactccgttgcccaggctggagtgtagtggcatgatctcagctcactgcaacctccgcctcccgggttcaagcaattctcctgcctcagcctcccgagtagctgggattacagaggcctgccaccacacccgactaattttcgtatttttagtagagacggggtttctccatgttggccaggctgttcttgaactcctgacctcaagtgctccacctgcgttggcttcccaaagtgctgggatacaggagtgagccactgcgcctggctgatcccagcacttttcaaatgatgccgctcaaagccgtgacttggcctactttgaacagcaaacttgttgctgctgttgtcaacctgaaggcctctcaaatgccagcttcaagcagggtgtgaattggccagtgtcagatctcaggagtcctgtgttgagagtgtggctttcagctgcggggagctgcacttggtggggaaagccaggcaggtcaccctcacagccagataatgtggaggtcagaacccaaggaagggagtgagacctccactcccagtgggggacctggccacccatccttggggacctgagaaagcgtacttcaccttctttctcccgctgaatcatttccctcaaagcccaagagctgtcactgcttctttctccctgggaagaatgcgtggactctgcctggtgatagactgaagccagaacagtgccacaccctcgccttaattccttgctaggtgttctcagatttatgagacttcttagtcaaatatgagggaggttggatgtggtggcttgtgcctgtaatcccagcattttgggaagccgaggtgggaggatcccttgaagccaggagtttgagacaagcctgggcaacaaagcaagaccctatctctaaaaaaaaaaaaaaaaaaaaaaaaaaaaaaaaaaaaaaaaaatctaggagatgctctttaccctgcctggcctcaaactattaatagcttcctttgagcaacattatttattatgaactttcaaacacaaaaaagtagagagagtagaataacaaatccccatgagcccatcacccaacttcagtaattatcaattcatggccatcttgttcacccctgcctgcttccctgcttcccctcattctgcagaggttcttttcttttgagacagagtgttgctctgttgcccaggctggagtgcagtggtgcaacttcggctcactgcaacctccgcctcccaggttcaagtgattctcctgcttcagcctctcaagtagctgggattacagatgcccgccaccacacctggctaattttcgtatttttgttagagatggggtttcaccatgttggccaggctggtctcgaactcctgacctcaagtgatccgcccgccttggcctcccaaaatgctgggattacaggtgtgaaccacggtgcctggccactgtacaggttatttatagaagttggagagtgaagggttgagaaagccaaggggcagatgcgggtctggaggattttgtgcctaaggccctctctttgctcccagacagcatgaagtaacaatgaggcatccacctcttggttttgtggcctctgtggatgacgtctctcaccttgaaccagttcagagttggagtagcgcaggatcctgtcttcagaggaggggccgaagcgggttcctctgttgtcaagctctttggaggtgcctggctgctactactgtcccagagaggtgatgatgaatgatgggtgtgtccagtggcagtttgccccactgaggcaggggcttccactaggccctgacagagcccttccagcaggcagaaatccctgtgctaggcaagattcaaactccgtagcatgtctcctgctcccatctcttaggaatggagtccttcaggccttgagtcccacattttccatgatgctccattaagcagctgatagcacccccacctccagggaaagtgagttcagagtccttggtctaatgcatctgtgttgaaattgaggccttcccctgtgttcacctttctgctctttttcttttagcccaaggctatgaaggcctcattcggtgctgggcatggtcactcctagcattcctcactctgttgctaacagcaacagcaataataataagggttacaacttactccataccttactgtctgccaggcattaagctaagtgctttacatatattaagtcatttaatcctcataatgaccctatgaaagagataccatctcaacccaattgacagctggtttgcaagattaggagggatgaaggacccaggggacaatgcgagggaaaactctgaccccggggccccaggctggatgttctttatgcctgtgaaccacagcttatcacatgtctggagttagggaccccacttaaagtgagattttggctggaggtggtggatcatacctataatcccagcactttgggagaccaaggcagaaggactgcttgaggccaggagttcaaaaccagtgtaggtaacagctagaccctatctctacaaaaaatttaaaaattagctgggtgtggtggtatgtgcctcaagttccagctactcaggaggctgaggtgggaggatcacttgagcacaggagtttgaagttacagtgagctatgatggcaccactgcacttcagcctaggcaacagagggagaccctgtctttaaagtacatagaggtttttcacaccaacacatctctgcccagtgtgccaacatctgccacctgctataatagtactataacactcaatatgtaattaatgtagtctcagggatgttatgacaatatgattacaactatcacgtgtgtgcccagccaggctcaatgccccaggctgggcgaggtggggcaggggacacagcctaaaatgccaggcctcaggaagccatttggtttagcagacattgtttattaaaggagttacctatgccagatcgaaggcctaagatgattaagacactatgagtgccttcaagtggttggggacgttcatgattgtggtacagacaaataggctttcacatcattcttttatgtaatcatacaacagatatttgcacctacatgtgcagagcactgtgataggcctcagtgacacagaataatacggcaaagaccccacccgatgagccccctcccaccacccaccagtacagtagggggtggtttaatggagtgttcctggaatatgaagtgggggcaggcattaggggtggcaaagggacaagtgtttatctgatcagttatgtactgtttataataagtaaatcagcagagggggaataatacttagaacctatagagagtaaatctgacaagatgaaatgctgatgaaaatatggaggaaatgaaactctcatgggttttgcagggaatctaagtcagtgctgtgttgtgaatgtaggtgtaccctttgaattcatatgttgaatcctaacccccaaagcaatggcattaagaggtggggcctttggggctgggtatggtggctcatgactgtaatcccagcactttgggatgctggcagggggcagatcacttgaagccaggagtctgagatcagcctggccaacatggtgaaaccccatctgtactaaaaatacaaaaattagccaggtgtgatggcgtacatctgtaatttcagccactcgggaggctgagacaggagaatagcttgaacccagtaggtggagatttcagtgagccgagatcgtgccactgcactccagcctgggtgacagagcgagactccatctcaaaaaaataataaagatgtggggcctgtgggaggtggttaggtcatgagggtggagatcatgaatggggttagcaccttataaaacaggcttgagggagccc

SEQ ID NO: 10655 - protein, 73 aa, Homo sapiens [sequence omitted]

SEQ ID NO: 10656 - DNA, 1109 bp, Homo sapiens
ctcaaactattaatagcttcctttgagcaacattatttattatgaactttcaaacacaaaaaagtagagagagtagaataacaaatccccatgagcccatcacccaacttcagtaattatcaattcatggccatcttgttcacccctgcctgcttccctgcttcccctcattctgcagaggttcttttcttttgagacagagtgttgctctgttgcccaggctggagtgcagtggtgcaacttcggctcactgcaacctccgcctcccaggttcaagtgattctcctgcttcagcctctcaagtagctgggattacagatgcccgccaccacacctggctaattttcgtatttttgttagagatggggtttcaccatgttggccaggctggtctcgaactcctgacctcaagtgatccgcccgccttggcctcccaaaatgctgggattacaggtgtgaaccacggtgcctggccactgtacaggttatttatagaagttggagagtgaagggttgagaaagccaaggggcagatgcgggtctggaggattttgtgcctaaggccctctctttgctcccagacagcatgaagtaacaatgaggcatccacctcttggttttgtggcctctgtggatgacgtctctcaccttgaaccagttcagagttggagtagcgcaggatcctgtcttcagaggaggggccgaagcgggttcctctgttgtcaagctctttggaggtgcctggctgctactactgtcccagagaggctaaggtgtttcattgtaacctgaatggaccaagctggtgtgaccctgttggaaaactggcagtatctaccaaaagccgaacatacgtataaactgatccagcagttccactcctgggtatgtacaccacagaaagctatgtccaccgagacattggcaagaatgtttctaaccacacgctgactgtagccccaaacctgaaacaacccaaatgtccatccaccaacccaaatgtccatccacagttgaagctacagtgaagtcacagggtcgaatactactgcacagcaacgaatatgaatgaaaatatcgctatgcacagcaacatggataaatttcac

SEQ ID NO: 10657 - protein, 64 aa, Homo sapiens [sequence omitted]

SEQ ID NO: 10658 - DNA, 771 bp, Homo sapiens
ttgtatttggcaggggtcaaaggcaggcagggactgtgaaatgttatagtggaaaaaaagggaaggctctgggtgtgctggtttctggccagagtctattgtcatatgtggcctggccattgtccagttgtatgttcagtctcttggaaggaagggtattgactctgagaggggccaccatcgctggaatgggggacacacagtacttcctccagctgcctacacccccctagggtcagtggcgcctgcctgtgagggtgagcccaatggctagagggctctgctccaagtcattgcttactacacccacaaacattcttcgttctttaaggcctaacttaaagcccagatcctacaggaaaccttgattagacccctctctttattaagcttcctaagatcaaaccctgcttttgtgtaaatgctgacctccttgcctacattttaaaaacctagagctgggcatgatggccccagcctgtaatcccagtgattcaggagactgaggtgggaggattgctagaagccaggagttcgagaccagcctgggtaacatagctagaccacatctcttaaaataaaatagttaatttagccaggcatgatgatatatgcctgtagtcccaactacttggaaggctgaggtgtgaggatctttgagcccgggaggtcgaggctacagtaagctatgatctcaccactgtactccagcctgggtgacagagcgagacccagactcaaaaaataaaaataaaaaccctgaatatcttc

SEQ ID NO: 10659 - protein, 33 aa, Homo sapiens
MARGLCSKSLLTTPTNILRSLRPNLKPRSYRKP

SEQ ID NO: 10660 - DNA, 1448 bp, Homo sapiens
ttgtatttggcaggggtcaaaggcaggcagggactgtgaaatgttatagtggaaaaaaagggaaggctctgggtgtgctggtttctggccagagtctattgtcatatgtggcctggccattgtccagttgtatgttcagtctcttggaaggaagggtattgactctgagaggggccaccatcgctggaatgggggacacacagtacttcctccagctgcctacacccccctagggtcagtggcgcctgcctgtgagggtgagcccaatggctagagggctctgctccaagtcattgcttactacacccacaaacattcttcgttctttaaggcctaacttaaagcccagatcctacaggaaaccttgattagacccctctctttattaagcttcctaagatcaaaccctgcttttgtgtaaatgctgacctccttgcctacattttaaaaacctagagctgggcatgatggccccagcctgtaatcccagtgattcaggagactgaggtgggaggattgctagaagccaggagttcgagaccagcctgggtaacatagctagaccacatctcttaaaataaaatagttaatttagccaggcatgatgatatatgcctgtagtcccaactacttggaaggctgaggtgtgaggatctttgagcccgggaggtcgaggctacagtaagctatgatctcaccactgtactccagcctgggtgacagagcgagacccagactcaaaaaataaaaataaaaaccctgaatatcttccttctacttcttcagtgctgtttttatttaaaaaaaaaaaaaaccagccaaaaccacaactttttactgaagtgtaatgtaaatgctgtaaaaggcagtgaaaggcacaagggaggtggaggggtaggaagggtggaagtggcgggaggaagtggcagggcaggcaaaatgaagggaagccctgggttcttgtcctgcatccgcagccagctcccactttcctcaccctccaggacctgtaaactgtgaggctggaccagttatgtcaaatctgtcctcccccagagctcagtccctctgcccttgggtgtccttggcacaaggcaggctaggctgcaccagcttcctccatctccgtcctgcctcccccatccccaggtgccattcccacaccatctgaatcactgatttcctcgcaatcagacgctatcttccagttaatcacttcgcttgtatttaacataagaaagaaaaaccctttcattatcacatacagctggaaatcggcttcttgcaggaggcgtatccaaaggaattggagaagagataaactggtaattggtgaaagaattactttaattttttttcctacttgctgtcatgatgatgtccttagaattgtgagcccgtggacacttctgtacaataaatctgctattattacttctagaactaca

SEQ ID NO: 10661 - protein, 45 aa, Homo sapiens
MSNLSSPRAQSLCPWVSLAQGRLGCTSFLHLRPASPIPRCHSHTI

SEQ ID NO: 10662 - DNA, 2513 bp, Homo sapiens
gtgggccggaagggggggcagggcgggccgggagggcgccccacggaacacttacgcggccgctttttcctcaggctttcgacgcgctggcgggagaccgaggtggggccgctgtaagagcccagtcgatcccgcctcgtgccctcagccgaggccccgaccgcgggcaccgacgcgctgctcgcccggcgccgcagtggctcctgccgccgcccttcggggtccccggccgcctgctccccagccgacgagacggaggtggcggaagccctgccgtggcgctccatgggcgcgccgagccggccccctcccatccgcagcagcagtcgctgccgcccgagcaagccccccagcgtcggattccttctcgcctcctccgcggcagtccagccagagcagaggcgcgccctcggccggccgcctcttccgttgcgccaacgcgcaggaagccaatccgacgaggctggggacggcccaaaggcctcgcgtccagtcggctccctaactcgaggaggattgaccgtgcctccgtccaatgagaggctatcgtgacggggcggggagagggtggtggaggaggggatccgggttccgcggaggaagagaaggcggtgtagcccagaagagagtgatggcggcgccgcccaatggacgcgtgggtggaagggcccgagcctcctcatccaccccctccttccgccccccacttgtgcatgcctctgcccccccgggccgcggaactctcctggggcgaccccgagtcccaccccgctgctccgtgccgtcctcgcagctcgagccctcctccagcccagcagtgctcccgcagcgtctggccgctggtcgtcggcagacgaaagggcttgaaccgcggctgaccttagcctttgtccctcggcctagttccgcagctgccgtcgaggccgccagcccctcccccagcatgtttgggctaagccgcctcctttccgcctgcgttggagagagaggtaccagaaggaatgaaaggactggggcttgtctccatggcaactgaaagaaagaggtgggttataaatccttcgccaccctcctgtggcgaaggaggggaagtgggagccgggaagtagagttggccttttgcaggagagtctggagcccctttctgggtgatgcattgggggccatagaaggatttggctgccgctttggagcatggattttttttttaatcatcttcctttctcttttggagagaaaaattggtcacctccaggactgagaccctgacccttccaagcatccccactaccaaaggctgcccaagcccggaaggatcccatcccgttctgtactctgaggtcacttcctcactccgtcaaatttcactggactgtgggctaattaaaagtgcctccgtattagcggggcgtggtggcccatgcctataatcccagctacttgggaagctgaggcaggaaaattgcttgaacccgggtggcggaggctgcagtgacccaacattgtgcaacaagagcgaaactccgtctcaaaaaaaataaaaaataaaaaagagtgcctccctggggagactgtaatgcccactgggcagtgatcctaatgccccttgggcagtgatccttattcccctctcccataatgattggttgtagcaggctgaacaaaaaggttgagcttcgcttgtgcttgctgaatagaattctcacgcccactccacgttagctcccctcactgtaggactagctctgaaaattctagctcctgtaggaagccaacacagacggatctacaagaaccaaaaacagctatagctactcttctaaatctcagtgcctgacattgcctctctttctgcctcctctctccaccccccaaaaaatgtggtcctccttgacctgagggagcttccgtccaagtctgagctctgatcatcctgaagaatcaaagtatcatcatcccttggctggcaagatgaactccaacatcaaaacacttgaaacagtagtatttttacacaatttgcccactgcctctacatctcacttagtccttgcagtaacatttggatgatgaggtaacttatccagaagcacaaagcctaaagaatgacagagcttggactcctgagaagttcagctactgcccgccttatgataaccaaaagaaagcggccgggcgcagtggctcaactcctgtaatcccagcactttgggaggccgaggcgtgcgaatcacaaggtcaggagtccgagaccagcctggccaacacagggaaaccccgtctctactaaaaaaaacaaacacaaaaattagttgggcgtggtggtgggcacctgtaatcccagctacttgggaggctgaggcaggagagtcacttgaatccggtaggcggaggttgcagtgagccgagatcgtgccactgcactccagcctgggagacagtgagactccgtctctaaaaaaaaatgaataaataaataagaaggcacaccacaagttcgagaccacttctac

SEQ ID NO: 10663 - protein, 166 aa, Homo sapiens [sequence omitted]

SEQ ID NO: 10664 - DNA, 429 bp, Homo sapiens
cgtcgaggccgccagcccctcccccagcatgtttgggctaagccgcctcctttccgcctgcgttggagagagaggtaccagaaggaatgaaaggactggggcttgtctccatggcaactgaaagaaagagagaaaaattggtcacctccaggactgagaccctgacccttccaagcatccccactaccaaaggctgcccaagcccggaaggatcccatcccgttctgtactctgaggtcacttcctcactccgtcaaatttcactggactgtgggctaattaaaagtgcctccgtattagcggggcgtggtggcccatgcctataatcccagctacttgggaagctgaggcaggaaaattgcttgaacccgggtggcggaggctgcagtgacccaacattgtgcaacaagagcgaaactccgtctcaaa

SEQ ID NO: 10665 - protein, 79 aa, Homo sapiens
MKGLGLVSMATERKREKLVTSRTETLTLPSIPTTKGCPSPEGSHPVLYSEVTSSLRQISLDCGLIKSASVLAGRGGPCL

SEQ ID NO: 10666 - DNA, 2520 bp, Homo sapiens
gggtggcgaaggatttataacccacctctttctttcagttgccatggagacaagccccagtcctttcattccttctggtacctctctctccaacgcaggcggaaaggaggcggcttagcccaaacatgctgggggaggggctggcggcctcgacggcagctgcggaactaggccgagggacaaaggctaaggtcagccgcggttcaagccctttcgtctgccgacgaccagcggccagacgctgcgggagcactgctgggctggaggagggctcgagctgcgaggacggcacggagcagcggggtgggactcggggtcgccccaggagagttccgcggcccgggggggcagaggcatgcacaagtggggggcggaaggagggggtggatgaggaggctcgggcccttccacccacgcgtccattgggcggcgccgccatcactctcttctgggctacaccgccttctcttcctccgcggaacccggatcccctcctccaccaccctctccccgccccgtcacgatagcctctcattggacggaggcacggtcaatcctcctcgagttagggagccgactggacgcgaggcctttgggccgtccccagcctcgtcggattggcttcctgcgcgttggcgcaacggaagaggcggccggccgagggcgcgcctctgctctggctggactgccgcggaggaggcgagaaggaatccgacgctggggggcttgctcgggcggcagcgactgctgctgcggatgggagggggccggctcggcgcgcccatggagcgccacggcagggcttccgccacctccgtctcgtcggctggggagcaggcggccggggaccccgaagggcggcggcaggagccactgcggcgccgggcgagcagcgcgtcggtgcccgcggtcggggcctcggctgagggcacgaggcgggatcgactgggctcttacagcggccccacctcggtctcccgccagcgcgtcgaaagcctgaggaaaaagcggccgctttttccatggtttggactggatatcggtggaactctggtcaagctggtatattttgaacccaaagacatcactgctgaagaagaagaggaagaagtggaaagtcttaaaagcattcggaagtacctgacctccaatgtggcttatgggtctacaggcattcgggacgtgcacctcgagctgaaggacctgactctgtgtggacgcaaaggcaatctgcactttatacgctttcccactcatgacatgcctgcttttattcaaatgggcagagataaaaacttctcgagtctccacactgtcttttgtgccactggaggtggagcgtacaaatttgagcaggattttctcacaataggtgatcttcagctttgcaaactggatgaactagattgcttgatcaaaggaattttatacattgactcagtcggattcaatggacggtcacagtgctattactttgaaaaccctgctgattctgaaaagtgtcagaagttaccatttgatttgaaaaatccgtatcctctgcttctggtgaacattggctcaggggttagcatcttagcagtatattccaaagataattacaaacgggtcacaggtactagtcttggaggaggaactttttttggtctctgctgtcttcttactggctgtaccacttttgaagaagctcttgaaatggcatctcgtggagatagcaccaaagtggataaactagtacgagatatttatggaggggactatgagaggtttggactgccaggctgggctgtggcttcaagctttggaaacatgatgagcaaggagaagcgagaggctgtcagtaaagaggacctggccagagcgactttgatcaccatcaccaacaacattggctcaatagcaagaatgtgtgcccttaatgaaaacattaaccaggtggtatttgttggaaatttcttgagaattaatacgatcgccatgcggcttttggcatatgctttggattattggtccaaggggcagttgaaagcacttttttcggaacacgagggttattttggagctgttggagcactccttgagctgttgaagatcccgtgatcattacctggggaggggttcctgaaaccttccacaatgggatctgtggactttcatttttttaagagacttactcaatttcatgactgtactacctgaaacaaagtgagaaaggacaggtgtatttttctaagtcatcaagataaatccttaagaattcagtctaaattagcaaccaggaaggaaaaatatattaaaaacaacaaaaaagtggcacatgtccaggcagtgtgaggatttgctgtatataagttgcctgctttgtatttttgaaatctctgcatcactcattggaagtgcttctgaagagagctgctctgtgttcagttgactggttttgtgtcctgtttgaacttgctgaatgtaaggcaggctactatgcgttataatctaatcacaatttgtcaatatggtcttggc

SEQ ID NO: 10667 - protein, 570 aa, Homo sapiens; identical to SEQ ID NO: 1643

SEQ ID NO: 10668 - DNA, 2600 bp, Homo sapiens
gggtggcgaaggatttataacccacctctttctttcagttgccatggagacaagccccagtcctttcattccttctggtacctctctctccaacgcaggcggaaaggaggcggcttagcccaaacatgctgggggaggggctggcggcctcgacggcagctgcggaactaggccgagggacaaaggctaaggtcagccgcggttcaagccctttcgtctgccgacgaccagcggccagacgctgcgggagcactgctgggctggaggagggctcgagctgcgaggacggcacggagcagcggggtgggactcggggtcgccccaggagagttccgcggcccgggggggcagaggcatgcacaagtggggggcggaaggagggggtggatgaggaggctcgggcccttccacccacgcgtccattgggcggcgccgccatcactctcttctgggctacaccgccttctcttcctccgcggaacccggatcccctcctccaccaccctctccccgccccgtcacgatagcctctcattggacggaggcacggtcaatcctcctcgagttagggagccgactggacgcgaggcctttgggccgtccccagcctcgtcggattggcttcctgcgcgttggcgcaacggaagaggcggccggccgagggcgcgcctctgctctggctggactgccgcggaggaggcgagaaggaatccgacgctggggggcttgctcgggcggcagcgactgctgctgcggatgggagggggccggctcggcgcgcccatggagcgccacggcagggcttccgccacctccgtctcgtcggctggggagcaggcggccggggaccccgaagggcggcggcaggagccactgcggcgccgggcgagcagcgcgtcggtgcccgcggtcggggcctcggctgagggcacgaggcgggatcgactgggctcttacagcggccccacctcggtctcccgccagcgcgtcgaaagcctgaggaaaaagcggccgctttttccatggtttggactggatatcggtggaactctggtcaagctggtatattttgaacccaaagacatcactgctgaagaagaagaggaagaagtggaaagtcttaaaagcattcggaagtacctgacctccaatgtggcttatgggtctacaggcattcgggacgtgcacctcgagctgaaggacctgactctgtgtggacgcaaaggcaatctgcactttatacgctttcccactcatgacatgcctgcttttattcaaatgggcagagataaaaacttctcgagtctccacactgtcttttgtgccactggaggtggagcgtacaaatttgagcaggattttctcacaataggtgatcttcagctttgcaaactggatgaactagattgcttgatcaaaggaattttatacattgactcagtcggattcaatggacggtcacagtgctattactttgaaaaccctgctgattctgaaaagtgtcagaagttaccatttgatttgaaaaatccgtatcctctgcttctggtgaacattggctcaggggttagcatcttagcagtatattccaaagataattacaaacgggtcacaggtactagtcttggaggaggaactttttttggtctctgctgtcttcttactggctgtaccacttttgaagaagctcttgaaatggcatctcgtggagatagcaccaaagtggataaactagtacgagatatttatggaggggactatgagaggtttggactgccaggctgggctgtggcttcaagctttggaaacatgatgagcaaggagaagcgagaggctgtcagtaaagaggacctggccagagcgactttgatcaccatcaccaacaacattggctcaatagcaagaatgtgtgcccttaatgaaaacattaaccaggtggtatttgttggaaatttcttgagaattaatacgatcgccatgcggcttttggcatatgctttggattattggtccaaggggcagttgaaagcacttttttcggaacacgagggttattttggagctgttggagcactccttgagctgttgaagatcccgtgatcattacctggggaggggttcctgaaaccttccacaatgggatctgtggactttcatttttttaagagacttactcaatttcatgactgtactacctgaaacaaagtgagaaaggacaggtgtatttttctaagtcatcaagataaatccttaagaattcagtctaaattagcaaccaggaaggaaaaatatattaaaaacaacaaaaaagtggcacatgtccaggcagtgtgaggatttgctgtatataagttgcctgctttgtatttttgaaatctctgcatcactcattggaagtgcttctgaagagagctgctctgtgttcagttgactggttttgtgtcctgtttgaacttgctgaatgtaaggcaggctactatgcgttataatctaatcacaatttgtcaatatggtcttggcaatcatctgtgcattactctggtttgcattaagcctgtgtgtgaacttactgtaaaacatgttttatttcaaggttctgc

SEQ ID NO: 10669 - protein, 570 aa, Homo sapiens; identical to SEQ ID NO: 1643

SEQ ID NO: 10670 - DNA, 7553 bp, Homo sapiens
gggtggcgaaggatttataacccacctctttctttcagttgccatggagacaagccccagtcctttcattccttctggtacctctctctccaacgcaggcggaaaggaggcggcttagcccaaacatgctgggggaggggctggcggcctcgacggcagctgcggaactaggccgagggacaaaggctaaggtcagccgcggttcaagccctttcgtctgccgacgaccagcggccagacgctgcgggagcactgctgggctggaggagggctcgagctgcgaggacggcacggagcagcggggtgggactcggggtcgccccaggagagttccgcggcccgggggggcagaggcatgcacaagtggggggcggaaggagggggtggatgaggaggctcgggcccttccacccacgcgtccattgggcggcgccgccatcactctcttctgggctacaccgccttctcttcctccgcggaacccggatcccctcctccaccaccctctccccgccccgtcacgatagcctctcattggacggaggcacggtcaatcctcctcgagttagggagccgactggacgcgaggcctttgggccgtccccagcctcgtcggattggcttcctgcgcgttggcgcaacggaagaggcggccggccgagggcgcgcctctgctctggctggactgccgcggaggaggcgagaaggaatccgacgctggggggcttgctcgggcggcagcgactgctgctgcggatgggagggggccggctcggcgcgcccatggagcgccacggcagggcttccgccacctccgtctcgtcggctggggagcaggcggccggggaccccgaagggcggcggcaggagccactgcggcgccgggcgagcagcgcgtcggtgcccgcggtcggggcctcggctgagggcacgaggcgggatcgactgggctcttacagcggccccacctcggtctcccgccagcgcgtcgaaagcctgaggaaaaagcggccgctttttccatggtttggactggatatcggtggaactctggtcaagctggtatattttgaacccaaagacatcactgctgaagaagaagaggaagaagtggaaagtcttaaaagcattcggaagtacctgacctccaatgtggcttatgggtctacaggcattcgggacgtgcacctcgagctgaaggacctgactctgtgtggacgcaaaggcaatctgcactttatacgctttcccactcatgacatgcctgcttttattcaaatgggcagagataaaaacttctcgagtctccacactgtcttttgtgccactggaggtggagcgtacaaatttgagcaggattttctcacaataggtgatcttcagctttgcaaactggatgaactagattgcttgatcaaaggaattttatacattgactcagtcggattcaatggacggtcacagtgctattactttgaaaaccctgctgattctgaaaagtgtcagaagttaccatttgatttgaaaaatccgtatcctctgcttctggtgaacattggctcaggggttagcatcttagcagtatattccaaagataattacaaacgggtcacaggtactagtcttggaggaggaactttttttggtctctgctgtcttcttactggctgtaccacttttgaagaagctcttgaaatggcatctcgtggagatagcaccaaagtggataaactagtacgagatatttatggaggggactatgagaggtttggactgccaggctgggctgtggcttcaagctttggaaacatgatgagcaaggagaagcgagaggctgtcagtaaagaggacctggccagagcgactttgatcaccatcaccaacaacattggctcaatagcaagaatgtgtgcccttaatgaaaacattaaccaggtggtatttgttggaaatttcttgagaattaatacgatcgccatgcggcttttggcatatgctttggattattggtccaaggggcagttgaaagcacttttttcggaacacgagggttattttggagctgttggagcactccttgagctgttgaagatcccgtgatcattacctggggaggggttcctgaaaccttccacaatgggatctgtggactttcatttttttaagagacttactcaatttcatgactgtactacctgaaacaaagtgagaaaggacaggtgtatttttctaagtcatcaagataaatccttaagaattcagtctaaattagcaaccaggaaggaaaaatatattaaaaacaacaaaaaagtggcacatgtccaggcagtgtgaggatttgctgtatataagttgcctgctttgtatttttgaaatctctgcatcactcattggaagtgcttctgaagagagctgctctgtgttcagttgactggttttgtgtcctgtttgaacttgctgaatgtaaggcaggctactatgcgttataatctaatcacaatttgtcaatatggtcttggcaatcatctgtgcattactctggtttgcattaagcctgtgtgtgaacttactgtaaaacatgttttatttcaaggttctgcaaaattaattgggcaggttaattgtgtacctgaaacttaacaagcagtttttggaagggcagttccacgttactttacactaaatcctgggaatgaatgtctggagagacagggcttcttttcttggcagaatttccttgggtagtgggcggactgttctgatgcaagtgggtacactggcagaagcagcacaatctggaggactaacatgagtcagcagggccactagaattgacaccccctcaggggatcagggagaatctggtttttctttcaggctaagtagaaaaggaagaactgaagtgtctgtcaaagaactcatggggagtggggggtccttcagggcactgtggcacttgggaggtgagtctcagaagactgcctgaggagagtgccaggctgcaggtgctcttggtaggggctgaagcttttctttctgctttgcagaataatttcaaaagcctttcccaaggagagaatgcaccttttatatctgaggtcttaagtggtgcccatattgctgttgaaggcaaggatgggcctgtacaaagcagccttggaccaggagggaaaaccccaaggctctgcagcctccctgctcccctccgtttaaggctgtggtcagggagggatgggcagggtgccagccgcatggaggcagcagagacacccgtgttccagctggggcaaggggaactgatatgtgggctgtgggctgttccactaggcgtggccacctctgcacatgggccttggcacttaggaaatatgggtgctgctgcattgggaccttgtgtgggtgcagagcaggatggctgctgcgtggagggtaattttgtcccctggagagtgattggtgaccctcttccctgctgctgctgtttgcaggctcctggcctatactacctctgacgccctgatcctgagttcctctgccctcctctgctgccagcagcgctgttggtggcctcaccctcctccagtacccaggcaccaaagatggcaccaccatcctcctgcttgtaccacagggtgctgctccctgggccaactcctgtgaacttgctcacttcccatggagaccgaggccagggcctgcccctctgaggcccctgttttgtggtcctgctgcctctgctgtgctgcgttcaggaggttgtccactgctcgacgtgggtcaccatgcagcccttgctgttcccacaatttaacagaaaaggaaactgaacggatgagtaaggctgcccagggtcactcagctggaaaagagtagagctggactcaaacccgggactgtctgtctctggtgcctgagttgggaagacgctgttgatgtccccttctgcctcgctttgagcttcctcctccgtgggccctccccctactctagagaaactagtccattccctcatgttccaccttgtgctcagtaaaccctgtcactccacagcagggtttttgagacagtctcgctgtgtcacccaggtggagtgcagtggggcgatctcagctcactgcaacctctgccttccaggctcaagcaattctcctgccttagcctcctgcgtagctgagactacaggcatgtgccaccatggctggctaatttttatatttttagtagagatggggtttcaccatgatggccaggctggtctcgaactccagaccccaggtgatccgcctgccttggcctcccaaagtgctgggaatacaggtgtgagcccctgcgcccggctcacagcagggttcttgataggccaccagtgaatcccatgccaccgaatctggcattcatttcacagcctcatctcagttctcactcagcagagccctcttgcctgtcctgccacccaggctactaatgttctggttcattctctgctgacagttagctgtggctgtcctcagcctcagtcctgggtctccccaagcagtcattagcatcaccttgactgatttccagggaacacttcaaccaccccttacctctgagctccagccccgagacactgccttctctctgcatttgttgatctctgtgcagcagtgcccacatcctcatcccagcttactgccgtctcaccaccttcaggttgtgaggtgcccataaactctgctgttaccattgccacttccctgtcttagcagctgtccctttcagtctgccctccactagtggccatgaagggggctgtgaccgtggtccaggtgagaaaggaaggcctgaactaagatgggaggtgggtggccagaatggagaggggagaagtggatggccagaatggagagatgcttagagggctgtgttgggaagtggtgactggatacaggggagggaggagagatacaagagggcacctgggctcatttgtggactacgtgattttgagactccaaataagcactgggtatttgggttggagatacagagctgagaatgatatgcatgtaggtgggcaaagcaagggggatttcatgagttctaaggtagggtgagaaaaataaccgagagttgagcagtgacggaggaagctgcaaagaaaacgactgctcagggagaggctggccaggggcctgtggctcaggggactgagaagaggagctctctaggcatctgaattgaggttgcccacaattggttgcaagatcgtggctggccttgatggaagctgggaagccactcggtcctagtgaggggtggtgaggagagcagcaacggccacacaggaaggctttggacgttttttctcctgacactagttatttccaggcctgggatatagctaggggcttggggtgggggcaactctttgcagggtggtgtggcctgtggaggaaacaggctcagttccactactttggccaggtgcaatggctcatgcctgtaatcccagcactttggaaggccaaggcgggtggatcacctgaggtcaggagttcaagaccagcctggacaacatggtgaaaccccgtctctactgaaaatacaaaaataattagccgggaatggtggtgcgtgcctgtaatcccaggtactcgagaggctgaggcagacagttgcttgaacctgggaggcagaggttgctgcagtgagccgagattgctgcactgcactccagcctgggtgacagcaagactgtctcaaaaaaaaaaaaaaaaaaaaatccgctatttcaggtcaccctggtgctggcgttcacgtggaagactgcttatctgtatccagctgtttgcagagctcagggaggccagggggcttcagactccactgtactctgcattccaggattctctgttctctggctgtggtggcctgacacactcttcaccactgaccccacccccgcttgcacactatgccacaggaagggcaggggcttccatcacaatcactcagtactagttaccagctctgatagaattactcaccttgagtttccaagtcttgctgaaggtgcttgcgtaagtggcacatggatgttccctctgttcaaaggcatatgcacaacactatttttcaaaatttgcttttatttacacgtttgagtcaattacatgcatgttttatttttgaggagtgattagcaaaatgcattaaaattttaaaatagcaattaaatatacaaaaatatagcttacaaaaaactgcgaatgtttaaaaatattctgctgcagaatttttagtgtacaaagacgtctatgaaacctgaggttcagcatttcataaacctttttttgagggagttacacaatacctagtgaggaaacccgagggccaaactacaagacgaaaaagtgccccgttcctggcaatgatgtcagaagaccaagaggcgatagttaccagcaacactctaggaagaccagctgtcaccagaagggagttcctaacacttgccacacctgctcccccgaccgggggcctgggagggaagggcagatggagaggaacggtgtgcagtgggcgtgagatgcagatccaccaggcttgggactggcaaagggagctgagaagagagttcccccaaagcacaaacaagtctgctgacactggtggggcccttacagtcacagaagtaaggactggatggtaagccaaaggtgctgatgcttggtcaaaaagtggagtacatctttgcatcttgtaacaatttgggctctacagctgaattggcaaagtaaggtttactacacaagcccctctttttcttctgatatccccactcaaatggaagcacactccccagcacatggggatcccttattaatctttactaaagaaccgtgaaccagcattttccagttatcaactggatatttaggcatgaatctggacatgtccatctgcttaagaaatctgcttaagaaatctgtaacagctacaggaaaagacacacccagggccagagattctacaaatgccagaagagtggatgtgatagagaattttttctcaagttttgggttagggcaccagttgcaattttaatccaggggaggatctgggctgctgctgtagggggcaagtacaccagggaggtgggtgtggacagaggcactgggcagctgctgggaagcgaggcacaagtctgtgcccctactcccagggctgcctggaggaagcagctctaactttcatcagcggggacaaaaatgaacttaaactaaaaaaattattggccgggcgcagtggctcacgcctgtaatcccagcactttgggaggtcaaggcaggtgcatcacgaggtcaggagatcgagaccatcctggctaacacggtgaaactccgtctgtactaaaaatacaaaaaattagccgagcgtggtggcgggcacctgttgtcccagctcccgaggcgggagaatggcgtgaacctgggaggcggagcttgcagtgggccaagatcgtgccactgcattccagcctgggtgacagagcgagactccgtctc

SEQ ID NO: 10671 - protein, 570 aa, Homo sapiens; identical to SEQ ID NO: 1643

SEQ ID NO: 10672 - DNA, 6604 bp, Homo sapiens
atgctgggggaggggctggcggcctcgacggcagctgcggaactaggccgagggacaaaggctaagtttttccatggtttggactggatatcggtggaactctggtcaagctggtatattttgaacccaaagacatcactgctgaagaagaagaggaagaagtggaaagtcttaaaagcattcggaagtacctgacctccaatgtggcttatgggtctacaggcattcgggacgtgcacctcgagctgaaggacctgactctgtgtggacgcaaaggcaatctgcactttatacgctttcccactcatgacatgcctgcttttattcaaatgggcagagataaaaacttctcgagtctccacactgtcttttgtgccactggaggtggagcgtacaaatttgagcaggattttctcacaataggtgatcttcagctttgcaaactggatgaactagattgcttgatcaaaggaattttatacattgactcagtcggattcaatggacggtcacagtgctattactttgaaaaccctgctgattctgaaaagtgtcagaagttaccatttgatttgaaaaatccgtatcctctgcttctggtgaacattggctcaggggttagcatcttagcagtatattccaaagataattacaaacgggtcacaggtactagtcttggaggaggaactttttttggtctctgctgtcttcttactggctgtaccacttttgaagaagctcttgaaatggcatctcgtggagatagcaccaaagtggataaactagtacgagatatttatggaggggactatgagaggtttggactgccaggctgggctgtggcttcaagctttggaaacatgatgagcaaggagaagcgagaggctgtcagtaaagaggacctggccagagcgactttgatcaccatcaccaacaacattggctcaatagcaagaatgtgtgcccttaatgaaaacattaaccaggtggtatttgttggaaatttcttgagaattaatacgatcgccatgcggcttttggcatatgctttggattattggtccaaggggcagttgaaagcacttttttcggaacacgagggttattttggagctgttggagcactccttgagctgttgaagatcccgtgatcattacctggggaggggttcctgaaaccttccacaatgggatctgtggactttcatttttttaagagacttactcaatttcatgactgtactacctgaaacaaagtgagaaaggacaggtgtatttttctaagtcatcaagataaatccttaagaattcagtctaaattagcaaccaggaaggaaaaatatattaaaaacaacaaaaaagtggcacatgtccaggcagtgtgaggatttgctgtatataagttgcctgctttgtatttttgaaatctctgcatcactcattggaagtgcttctgaagagagctgctctgtgttcagttgactggttttgtgtcctgtttgaacttgctgaatgtaaggcaggctactatgcgttataatctaatcacaatttgtcaatatggtcttggcaatcatctgtgcattactctggtttgcattaagcctgtgtgtgaacttactgtaaaacatgttttatttcaaggttctgcaaaattaattgggcaggttaattgtgtacctgaaacttaacaagcagtttttggaagggcagttccacgttactttacactaaatcctgggaatgaatgtctggagagacagggcttcttttcttggcagaatttccttgggtagtgggcggactgttctgatgcaagtgggtacactggcagaagcagcacaatctggaggactaacatgagtcagcagggccactagaattgacaccccctcaggggatcagggagaatctggtttttctttcaggctaagtagaaaaggaagaactgaagtgtctgtcaaagaactcatggggagtggggggtccttcagggcactgtggcacttgggaggtgagtctcagaagactgcctgaggagagtgccaggctgcaggtgctcttggtaggggctgaagcttttctttctgctttgcagaataatttcaaaagcctttcccaaggagagaatgcaccttttatatctgaggtcttaagtggtgcccatattgctgttgaaggcaaggatgggcctgtacaaagcagccttggaccaggagggaaaaccccaaggctctgcagcctccctgctcccctccgtttaaggctgtggtcagggagggatgggcagggtgccagccgcatggaggcagcagagacacccgtgttccagctggggcaaggggaactgatatgtgggctgtgggctgttccactaggcgtggccacctctgcacatgggccttggcacttaggaaatatgggtgctgctgcattgggaccttgtgtgggtgcagagcaggatggctgctgcgtggagggtaattttgtcccctggagagtgattggtgaccctcttccctgctgctgctgtttgcaggctcctggcctatactacctctgacgccctgatcctgagttcctctgccctcctctgctgccagcagcgctgttggtggcctcaccctcctccagtacccaggcaccaaagatggcaccaccatcctcctgcttgtaccacagggtgctgctccctgggccaactcctgtgaacttgctcacttcccatggagaccgaggccagggcctgcccctctgaggcccctgttttgtggtcctgctgcctctgctgtgctgcgttcaggaggttgtccactgctcgacgtgggtcaccatgcagcccttgctgttcccacaatttaacagaaaaggaaactgaacggatgagtaaggctgcccagggtcactcagctggaaaagagtagagctggactcaaacccgggactgtctgtctctggtgcctgagttgggaagacgctgttgatgtccccttctgcctcgctttgagcttcctcctccgtgggccctccccctactctagagaaactagtccattccctcatgttccaccttgtgctcagtaaaccctgtcactccacagcagggtttttgagacagtctcgctgtgtcacccaggtggagtgcagtggggcgatctcagctcactgcaacctctgccttccaggctcaagcaattctcctgccttagcctcctgcgtagctgagactacaggcatgtgccaccatggctggctaatttttatatttttagtagagatggggtttcaccatgatggccaggctggtctcgaactccagaccccaggtgatccgcctgccttggcctcccaaagtgctgggaatacaggtgtgagcccctgcgcccggctcacagcagggttcttgataggccaccagtgaatcccatgccaccgaatctggcattcatttcacagcctcatctcagttctcactcagcagagccctcttgcctgtcctgccacccaggctactaatgttctggttcattctctgctgacagttagctgtggctgtcctcagcctcagtcctgggtctccccaagcagtcattagcatcaccttgactgatttccagggaacacttcaaccaccccttacctctgagctccagccccgagacactgccttctctctgcatttgttgatctctgtgcagcagtgcccacatcctcatcccagcttactgccgtctcaccaccttcaggttgtgaggtgcccataaactctgctgttaccattgccacttccctgtcttagcagctgtccctttcagtctgccctccactagtggccatgaagggggctgtgaccgtggtccaggtgagaaaggaaggcctgaactaagatgggaggtgggtggccagaatggagaggggagaagtggatggccagaatggagagatgcttagagggctgtgttgggaagtggtgactggatacaggggagggaggagagatacaagagggcacctgggctcatttgtggactacgtgattttgagactccaaataagcactgggtatttgggttggagatacagagctgagaatgatatgcatgtaggtgggcaaagcaagggggatttcatgagttctaaggtagggtgagaaaaataaccgagagttgagcagtgacggaggaagctgcaaagaaaacgactgctcagggagaggctggccaggggcctgtggctcaggggactgagaagaggagctctctaggcatctgaattgaggttgcccacaattggttgcaagatcgtggctggccttgatggaagctgggaagccactcggtcctagtgaggggtggtgaggagagcagcaacggccacacaggaaggctttggacgttttttctcctgacactagttatttccaggcctgggatatagctaggggcttggggtgggggcaactctttgcagggtggtgtggcctgtggaggaaacaggctcagttccactactttggccaggtgcaatggctcatgcctgtaatcccagcactttggaaggccaaggcgggtggatcacctgaggtcaggagttcaagaccagcctggacaacatggtgaaaccccgtctctactgaaaatacaaaaataattagccgggaatggtggtgcgtgcctgtaatcccaggtactcgagaggctgaggcagacagttgcttgaacctgggaggcagaggttgctgcagtgagccgagattgctgcactgcactccagcctgggtgacagcaagactgtctcaaaaaaaaaaaaaaaaaaaaatccgctatttcaggtcaccctggtgctggcgttcacgtggaagactgcttatctgtatccagctgtttgcagagctcagggaggccagggggcttcagactccactgtactctgcattccaggattctctgttctctggctgtggtggcctgacacactcttcaccactgaccccacccccgcttgcacactatgccacaggaagggcaggggcttccatcacaatcactcagtactagttaccagctctgatagaattactcaccttgagtttccaagtcttgctgaaggtgcttgcgtaagtggcacatggatgttccctctgttcaaaggcatatgcacaacactatttttcaaaatttgcttttatttacacgtttgagtcaattacatgcatgttttatttttgaggagtgattagcaaaatgcattaaaattttaaaatagcaattaaatatacaaaaatatagcttacaaaaaactgcgaatgtttaaaaatattctgctgcagaatttttagtgtacaaagacgtctatgaaacctgaggttcagcatttcataaacctttttttgagggagttacacaatacctagtgaggaaacccgagggccaaactacaagacgaaaaagtgccccgttcctggcaatgatgtcagaagaccaagaggcgatagttaccagcaacactctaggaagaccagctgtcaccagaagggagttcctaacacttgccacacctgctcccccgaccgggggcctgggagggaagggcagatggagaggaacggtgtgcagtgggcgtgagatgcagatccaccaggcttgggactggcaaagggagctgagaagagagttcccccaaagcacaaacaagtctgctgacactggtggggcccttacagtcacagaagtaaggactggatggtaagccaaaggtgctgatgcttggtcaaaaagtggagtacatctttgcatcttgtaacaatttgggctctacagctgaattggcaaagtaaggtttactacacaagcccctctttttcttctgatatccccactcaaatggaagcacactccccagcacatggggatcccttattaatctttactaaagaaccgtgaaccagcattttccagttatcaactggatatttaggcatgaatctggacatgtccatctgcttaagaaatctgcttaagaaatctgtaacagctacaggaaaagacacacccagggccagagattctacaaatgccagaagagtggatgtgatagagaattttttctcaagttttgggttagggcaccagttgcaattttaatccaggggaggatctgggctgctgctgtagggggcaagtacaccagggaggtgggtgtggacagaggcactgggcagctgctgggaagcgaggcacaagtctgtgcccctactcccagggctgcctggaggaagcagctctaactttcatcagcggggacaaaaatgaacttaaactaaaaaaattattggccgggcgcagtggctcacgcctgtaatcccagcactttgggaggtcaaggcaggtgcatcacgaggtcaggagatcgagaccatcctggctaacacggtgaaactccgtctgtactaaaaatacaaaaaattagccgagcgtggtggcgggcacctgttgtcccagctcccgaggcgggagaatggcgtgaacctgggaggcggagcttgcagtgggccaagatcgtgccactgcattccagcctgggtgacagagcgagactccgtctc

SEQ ID NO: 10673 - protein, 279 aa, Homo sapiens; identical to SEQ ID NO: 1641

SEQ ID NO: 10674 - DNA, 1782 bp, Homo sapiens
tctggctggactgccgcggaggaggcgagaaggaatccgacgctggggggcttgctcgggcggcagcgactgctgctgcggatgggagggggccggctcggcgcgcccatggagcgccacggcagggcttccgccacctccgtctcgtcggctggggagcaggcggccggggaccccgaagggcggcggcaggagccactgcggcgccgggcgagcagcgcgtcggtgcccgcggtcggggcctcggctgagggcacgaggcgggatcgactgggctcttacagcggccccacctcggtctcccgccagcgcgtcgaaagcctgaggaaaaagcggccgctttttccatggtttggactggatatcggtggaactctggtcaagctggtatattttgaacccaaagacatcactgctgaagaagaagaggaagaagtggaaagtcttaaaagcattcggaagtacctgacctccaatgtggcttatgggtctacaggcattcgggacgtgcacctcgagctgaaggacctgactctgtgtggacgcaaagataggtgatcttcagctttgcaaactggatgaactagattgcttgatcaaaggaattttatacattgactcagtcggattcaatggacggtcacagtgctattactttgaaaaccctgctgattctgaaaagtgtcagaagttaccatttgatttgaaaaatccgtatcctctgcttctggtgaacattggctcaggggttagcatcttagcagtatattccaaagataattacaaacgggtcacaggtactagtcttggaggaggaactttttttggtctctgctgtcttcttactggctgtaccacttttgaagaagctcttgaaatggcatctcgtggagatagcaccaaagtggataaactagtacgagatatttatggaggggactatgagaggtttggactgccaggctgggctgtggcttcaagctttggaaacatgatgagcaaggagaagcgagaggctgtcagtaaagaggacctggccagagcgactttgatcaccatcaccaacaacattggctcaatagcaagaatgtgtgcccttaatgaaaacattaaccaggtggtatttgttggaaatttcttgagaattaatacgatcgccatgcggcttttggcatatgctttggattattggtccaaggggcagttgaaagcacttttttcggaacacgagggttattttggagctgttggagcactccttgagctgttgaagatcccgtgatcattacctggggaggggttcctgaaaccttccacaatgggatctgtggactttcatttttttaagagacttactcaatttcatgactgtactacctgaaacaaagtgagaaaggacaggtgtatttttctaagtcatcaagataaatccttaagaattcagtctaaattagcaaccaggaaggaaaaatatattaaaaacaacaaaaaagtggcacatgtccaggcagtgtgaggatttgctgtatataagttgcctgctttgtatttttgaaatctctgcatcactcattggaagtgcttctgaagagagctgctctgtgttcagttgactggttttgtgtcctgtttgaacttgctgaatgtaaggcaggctactatgcgttataatctaatcacaatttgtcaatatggtcttggcaatcatctgtgcattactctggtttgcattaagcctgtgtgtgaacttactgtaaaacatgttttatttcaaggttctgc

SEQ ID NO: 10675 - protein, 158 aa, Homo sapiens
MGGGRLGAPMERHGRASATSVSSAGEQAAGDPEGRRQEPLRRRASSASVPAVGASAEGTRRDRLGSYSGPTSVSRQRVESLRKKRPLFPWFGLDIGGTLVKLVYFEPKDITAEEEEEEVESLKSIRKYLTSNVAYGSTGIRDVHLELKDLTLCGRKDR

SEQ ID NO: 10676 - DNA, 1285 bp, Homo sapiens
aggaggcgagaaggaatccgacgctggggggcttgctcgggcggcagcgactgctgctgcggatgggagggggccggctcggcgcgcccatggagcgccacggcagggcttccgccacctccgtctcgtcggctggggagcaggcggccggggaccccgaagggcggcggcaggagccactgcggcgccgggcgagcagcgcgtcggtgcccgcggtcggggcctcggctgagggcacgaggcgggatcgactgggctcttacagcggccccacctcggtctcccgccagcgcgtcgaaagcctgaggaaaaagcggccgctttttccatggtttggactggatatcggtggaactctggtcaagctggtatattttgaacccaaagacatcactgctgaagaagaagaggaagaagtggaaagtcttaaaagcattcggaagtacctgacctccaatgtggcttatgggtctacaggcattcgggacgtgcacctcgagctgaaggacctgactctgtgtggacgcaaaggcaatctgcactttatacgctttcccactcatgacatgcctgcttttattcaaatgggcagagataaaaacttctcgagtctccacactgtcttttgtgccactggaggtggagcgtacaaatttgagcaggattttctcacagtatgcattttttagcttatatacaatttatggtaatttgattgttaaaaataatgccagtagcaagtggtgaaataatttccatctctaatggaacttgaattttcttgagtcaaatgaagattaaaggtacgctagtgataggagttggccatctagaggtggttgtctagttcagatgtatggacgacaatcagaaccactaaaagggtagcattttattgctcctttagtatgaaaaattagggcatctgctatacgttgaggaagaaactacctaaaaggaacatcattagatcatgaacaatgagattgaaatataattaaaatcatttcatgtcataaaattgttttcagtcttgtctaccacataatttctcttgtctccctcagttgtttgctggcatgttcactaactgaaaaaaataaggaactctggtcaaaagtggtgttttcaggctcagggctggtctgagatgggtgactgcagagccctcctctcccagaatgctttctgatgtgttctgtgctgcacacttaactggagtctcgccaccatgtctggcccctggggaatgctgccaggcgctctatcttgctttcattgagtg

SEQ ID NO: 10677 - protein, 208 aa, Homo sapiens
MGGGRLGAPMERHGRASATSVSSAGEQAAGDPEGRRQEPLRRRASSASVPAVGASAEGTRRDRLGSYSGPTSVSRQRVESLRKKRPLFPWFGLDIGGTLVKLVYFEPKDITAEEEEEEVESLKSIRKYLTSNVAYGSTGIRDVHLELKDLTLCGRKGNLHFIRFPTHDMPAFIQMGRDKNFSSLHTVFCATGGGAYKFEQDFLTVCIF

SEQ ID NO: 10678 - DNA, 1548 bp, Homo sapiens
ccggccccgccgccgtttttcccgcgcgcggacactgtccccgcacggtggtccctcgttggtgcgtggcctgacatccggctggaggcctcgggtgctccgaaagcggtaccttcgggggcccccccgcacccattgtttttccatggtttggactggatatcggtggaactctggtcaagctggtatattttgaacccaaagacatcactgctgaagaagaagaggaagaagtggaaagtcttaaaagcattcggaagtacctgacctccaatgtggcttatgggtctacaggcattcgggacgtgcacctcgagctgaaggacctgactctgtgtggacgcaaaggcaatctgcactttatacgctttcccactcatgacatgcctgcttttattcaaatgggcagagataaaaacttctcgagtctccacactgtcttttgtgccactggaggtggagcgtacaaatttgagcaggattttctcacaataggtgatcttcagctttgcaaactggatgaactagattgcttgatcaaaggaattttatacattgactcagtcggattcaatggacggtcacagtgctattactttgaaaaccctgctgattctgaaaagtgtcagaagttaccatttgatttgaaaaatccgtatcctctgcttctggtgaacattggctcaggggttagcatcttagcagtatattccaaagataattacaaacgggtcacaggtactagtcttggaggaggaactttttttggtctctgctgtcttcttactggctgtaccacttttgaagaagctcttgaaatggcatctcgtggagatagcaccaaagtggataaactagtacgagatatttatggaggggactatgagaggtttggactgccaggctgggctgtggcttcaagctttggaaacatgatgagcaaggagaagcgagaggctgtcagtaaagaggacctggccagagcgactttgatcaccatcaccaacaacattggctcaatagcaagaatgtgtgcccttaatgaaaacattaaccaggtggtatttgttggaaatttcttgagaattaatacgatcgccatgcggcttttggcatatgctttggattattggtccaaggggcagttgaaagcacttttttcggaacacgagggttattttggagctgttggagcactccttgagctgttgaagatcccgtgatcattacctggggaggggttcctgaaaccttccacaatgggatctgtggactttcatttttttaagagacttactcaatttcatgactgtactacctgaaacaaagtgagaaaggacaggtgtatttttctaagtcatcaagataaatccttaagaattcagtctaaattagcaaccaggaaggaaaaatatattaaaaacaacaaaaaagtggcacatgtccaggcagtgtgaggatttgctgtatataagttgcctgctttgtatttttgaaatctctgcatcactcattggaagtgcttctgaagagagctgctctgtgttc

SEQ ID NO: 10679 - protein, 279 aa, Homo sapiens; identical to SEQ ID NO: 1641

SEQ ID NO: 10680 - DNA, 1643 bp, Homo sapiens
ccggccccgccgccgtttttcccgcgcgcggacactgtccccgcacggtggtccctcgttggtgcgtggcctgacatccggctggaggcctcgggtgctccgaaagcggtaccttcgggggcccccccgcacccattgtttttccatggtttggactggatatcggtggaactctggtcaagctggtatattttgaacccaaagacatcactgctgaagaagaagaggaagaagtggaaagtcttaaaagcattcggaagtacctgacctccaatgtggcttatgggtctacaggcattcgggacgtgcacctcgagctgaaggacctgactctgtgtggacgcaaaggcaatctgcactttatacgctttcccactcatgacatgcctgcttttattcaaatgggcagagataaaaacttctcgagtctccacactgtcttttgtgccactggaggtggagcgtacaaatttgagcaggattttctcacaataggtgatcttcagctttgcaaactggatgaactagattgcttgatcaaaggaattttatacattgactcagtcggattcaatggacggtcacagtgctattactttgaaaaccctgctgattctgaaaagtgtcagaagttaccatttgatttgaaaaatccgtatcctctgcttctggtgaacattggctcaggggttagcatcttagcagtatattccaaagataattacaaacgggtcacaggtactagtcttggaggaggaactttttttggtctctgctgtcttcttactggctgtaccacttttgaagaagctcttgaaatggcatctcgtggagatagcaccaaagtggataaactagtacgagatatttatggaggggactatgagaggtttggactgccaggctgggctgtggcttcaagctttggaaacatgatgagcaaggagaagcgagaggctgtcagtaaagaggacctggccagagcgactttgatcaccatcaccaacaacattggctcaatagcaagaatgtgtgcccttaatgaaaacattaaccaggtggtatttgttggaaatttcttgagaattaatacgatcgccatgcggcttttggcatatgctttggattattggtccaaggggcagttgaaagcacttttttcggaacacgagggttattttggagctgttggagcactccttgagctgttgaagatcccgtgatcattacctggggaggggttcctgaaaccttccacaatgggatctgtggactttcatttttttaagagacttactcaatttcatgactgtactacctgaaacaaagtgagaaaggacaggtgtatttttctaagtcatcaagataaatccttaagaattcagtctaaattagcaaccaggaaggaaaaatatattaaaaacaacaaaaaagtggcacatgtccaggcagtgtgaggatttgctgtatataagttgcctgctttgtatttttgaaatctctgcatcactcattggaagtgcttctgaagagagctgctctgtgttcagttgactggttttgtgtcctgtttgaacttgctgaatgtaaggcaggctactatgcgttataatctaatcacaatttgtcaatatggtcttggc

SEQ ID NO: 10681 - protein, 279 aa, Homo sapiens; identical to SEQ ID NO: 1641

SEQ ID NO: 10682 - DNA, 1723 bp, Homo sapiens
ccggccccgccgccgtttttcccgcgcgcggacactgtccccgcacggtggtccctcgttggtgcgtggcctgacatccggctggaggcctcgggtgctccgaaagcggtaccttcgggggcccccccgcacccattgtttttccatggtttggactggatatcggtggaactctggtcaagctggtatattttgaacccaaagacatcactgctgaagaagaagaggaagaagtggaaagtcttaaaagcattcggaagtacctgacctccaatgtggcttatgggtctacaggcattcgggacgtgcacctcgagctgaaggacctgactctgtgtggacgcaaaggcaatctgcactttatacgctttcccactcatgacatgcctgcttttattcaaatgggcagagataaaaacttctcgagtctccacactgtcttttgtgccactggaggtggagcgtacaaatttgagcaggattttctcacaataggtgatcttcagctttgcaaactggatgaactagattgcttgatcaaaggaattttatacattgactcagtcggattcaatggacggtcacagtgctattactttgaaaaccctgctgattctgaaaagtgtcagaagttaccatttgatttgaaaaatccgtatcctctgcttctggtgaacattggctcaggggttagcatcttagcagtatattccaaagataattacaaacgggtcacaggtactagtcttggaggaggaactttttttggtctctgctgtcttcttactggctgtaccacttttgaagaagctcttgaaatggcatctcgtggagatagcaccaaagtggataaactagtacgagatatttatggaggggactatgagaggtttggactgccaggctgggctgtggcttcaagctttggaaacatgatgagcaaggagaagcgagaggctgtcagtaaagaggacctggccagagcgactttgatcaccatcaccaacaacattggctcaatagcaagaatgtgtgcccttaatgaaaacattaaccaggtggtatttgttggaaatttcttgagaattaatacgatcgccatgcggcttttggcatatgctttggattattggtccaaggggcagttgaaagcacttttttcggaacacgagggttattttggagctgttggagcactccttgagctgttgaagatcccgtgatcattacctggggaggggttcctgaaaccttccacaatgggatctgtggactttcatttttttaagagacttactcaatttcatgactgtactacctgaaacaaagtgagaaaggacaggtgtatttttctaagtcatcaagataaatccttaagaattcagtctaaattagcaaccaggaaggaaaaatatattaaaaacaacaaaaaagtggcacatgtccaggcagtgtgaggatttgctgtatataagttgcctgctttgtatttttgaaatctctgcatcactcattggaagtgcttctgaagagagctgctctgtgttcagttgactggttttgtgtcctgtttgaacttgctgaatgtaaggcaggctactatgcgttataatctaatcacaatttgtcaatatggtcttggcaatcatctgtgcattactctggtttgcattaagcctgtgtgtgaacttactgtaaaacatgttttatttcaaggttctgc

SEQ ID NO: 10683 - protein, 279 aa, Homo sapiens; identical to SEQ ID NO: 1641

SEQ ID NO: 10684 - DNA, 6676 bp, Homo sapiens
ccggccccgccgccgtttttcccgcgcgcggacactgtccccgcacggtggtccctcgttggtgcgtggcctgacatccggctggaggcctcgggtgctccgaaagcggtaccttcgggggcccccccgcacccattgtttttccatggtttggactggatatcggtggaactctggtcaagctggtatattttgaacccaaagacatcactgctgaagaagaagaggaagaagtggaaagtcttaaaagcattcggaagtacctgacctccaatgtggcttatgggtctacaggcattcgggacgtgcacctcgagctgaaggacctgactctgtgtggacgcaaaggcaatctgcactttatacgctttcccactcatgacatgcctgcttttattcaaatgggcagagataaaaacttctcgagtctccacactgtcttttgtgccactggaggtggagcgtacaaatttgagcaggattttctcacaataggtgatcttcagctttgcaaactggatgaactagattgcttgatcaaaggaattttatacattgactcagtcggattcaatggacggtcacagtgctattactttgaaaaccctgctgattctgaaaagtgtcagaagttaccatttgatttgaaaaatccgtatcctctgcttctggtgaacattggctcaggggttagcatcttagcagtatattccaaagataattacaaacgggtcacaggtactagtcttggaggaggaactttttttggtctctgctgtcttcttactggctgtaccacttttgaagaagctcttgaaatggcatctcgtggagatagcaccaaagtggataaactagtacgagatatttatggaggggactatgagaggtttggactgccaggctgggctgtggcttcaagctttggaaacatgatgagcaaggagaagcgagaggctgtcagtaaagaggacctggccagagcgactttgatcaccatcaccaacaacattggctcaatagcaagaatgtgtgcccttaatgaaaacattaaccaggtggtatttgttggaaatttcttgagaattaatacgatcgccatgcggcttttggcatatgctttggattattggtccaaggggcagttgaaagcacttttttcggaacacgagggttattttggagctgttggagcactccttgagctgttgaagatcccgtgatcattacctggggaggggttcctgaaaccttccacaatgggatctgtggactttcatttttttaagagacttactcaatttcatgactgtactacctgaaacaaagtgagaaaggacaggtgtatttttctaagtcatcaagataaatccttaagaattcagtctaaattagcaaccaggaaggaaaaatatattaaaaacaacaaaaaagtggcacatgtccaggcagtgtgaggatttgctgtatataagttgcctgctttgtatttttgaaatctctgcatcactcattggaagtgcttctgaagagagctgctctgtgttcagttgactggttttgtgtcctgtttgaacttgctgaatgtaaggcaggctactatgcgttataatctaatcacaatttgtcaatatggtcttggcaatcatctgtgcattactctggtttgcattaagcctgtgtgtgaacttactgtaaaacatgttttatttcaaggttctgcaaaattaattgggcaggttaattgtgtacctgaaacttaacaagcagtttttggaagggcagttccacgttactttacactaaatcctgggaatgaatgtctggagagacagggcttcttttcttggcagaatttccttgggtagtgggcggactgttctgatgcaagtgggtacactggcagaagcagcacaatctggaggactaacatgagtcagcagggccactagaattgacaccccctcaggggatcagggagaatctggtttttctttcaggctaagtagaaaaggaagaactgaagtgtctgtcaaagaactcatggggagtggggggtccttcagggcactgtggcacttgggaggtgagtctcagaagactgcctgaggagagtgccaggctgcaggtgctcttggtaggggctgaagcttttctttctgctttgcagaataatttcaaaagcctttcccaaggagagaatgcaccttttatatctgaggtcttaagtggtgcccatattgctgttgaaggcaaggatgggcctgtacaaagcagccttggaccaggagggaaaaccccaaggctctgcagcctccctgctcccctccgtttaaggctgtggtcagggagggatgggcagggtgccagccgcatggaggcagcagagacacccgtgttccagctggggcaaggggaactgatatgtgggctgtgggctgttccactaggcgtggccacctctgcacatgggccttggcacttaggaaatatgggtgctgctgcattgggaccttgtgtgggtgcagagcaggatggctgctgcgtggagggtaattttgtcccctggagagtgattggtgaccctcttccctgctgctgctgtttgcaggctcctggcctatactacctctgacgccctgatcctgagttcctctgccctcctctgctgccagcagcgctgttggtggcctcaccctcctccagtacccaggcaccaaagatggcaccaccatcctcctgcttgtaccacagggtgctgctccctgggccaactcctgtgaacttgctcacttcccatggagaccgaggccagggcctgcccctctgaggcccctgttttgtggtcctgctgcctctgctgtgctgcgttcaggaggttgtccactgctcgacgtgggtcaccatgcagcccttgctgttcccacaatttaacagaaaaggaaactgaacggatgagtaaggctgcccagggtcactcagctggaaaagagtagagctggactcaaacccgggactgtctgtctctggtgcctgagttgggaagacgctgttgatgtccccttctgcctcgctttgagcttcctcctccgtgggccctccccctactctagagaaactagtccattccctcatgttccaccttgtgctcagtaaaccctgtcactccacagcagggtttttgagacagtctcgctgtgtcacccaggtggagtgcagtggggcgatctcagctcactgcaacctctgccttccaggctcaagcaattctcctgccttagcctcctgcgtagctgagactacaggcatgtgccaccatggctggctaatttttatatttttagtagagatggggtttcaccatgatggccaggctggtctcgaactccagaccccaggtgatccgcctgccttggcctcccaaagtgctgggaatacaggtgtgagcccctgcgcccggctcacagcagggttcttgataggccaccagtgaatcccatgccaccgaatctggcattcatttcacagcctcatctcagttctcactcagcagagccctcttgcctgtcctgccacccaggctactaatgttctggttcattctctgctgacagttagctgtggctgtcctcagcctcagtcctgggtctccccaagcagtcattagcatcaccttgactgatttccagggaacacttcaaccaccccttacctctgagctccagccccgagacactgccttctctctgcatttgttgatctctgtgcagcagtgcccacatcctcatcccagcttactgccgtctcaccaccttcaggttgtgaggtgcccataaactctgctgttaccattgccacttccctgtcttagcagctgtccctttcagtctgccctccactagtggccatgaagggggctgtgaccgtggtccaggtgagaaaggaaggcctgaactaagatgggaggtgggtggccagaatggagaggggagaagtggatggccagaatggagagatgcttagagggctgtgttgggaagtggtgactggatacaggggagggaggagagatacaagagggcacctgggctcatttgtggactacgtgattttgagactccaaataagcactgggtatttgggttggagatacagagctgagaatgatatgcatgtaggtgggcaaagcaagggggatttcatgagttctaaggtagggtgagaaaaataaccgagagttgagcagtgacggaggaagctgcaaagaaaacgactgctcagggagaggctggccaggggcctgtggctcaggggactgagaagaggagctctctaggcatctgaattgaggttgcccacaattggttgcaagatcgtggctggccttgatggaagctgggaagccactcggtcctagtgaggggtggtgaggagagcagcaacggccacacaggaaggctttggacgttttttctcctgacactagttatttccaggcctgggatatagctaggggcttggggtgggggcaactctttgcagggtggtgtggcctgtggaggaaacaggctcagttccactactttggccaggtgcaatggctcatgcctgtaatcccagcactttggaaggccaaggcgggtggatcacctgaggtcaggagttcaagaccagcctggacaacatggtgaaaccccgtctctactgaaaatacaaaaataattagccgggaatggtggtgcgtgcctgtaatcccaggtactcgagaggctgaggcagacagttgcttgaacctgggaggcagaggttgctgcagtgagccgagattgctgcactgcactccagcctgggtgacagcaagactgtctcaaaaaaaaaaaaaaaaaaaaatccgctatttcaggtcaccctggtgctggcgttcacgtggaagactgcttatctgtatccagctgtttgcagagctcagggaggccagggggcttcagactccactgtactctgcattccaggattctctgttctctggctgtggtggcctgacacactcttcaccactgaccccacccccgcttgcacactatgccacaggaagggcaggggcttccatcacaatcactcagtactagttaccagctctgatagaattactcaccttgagtttccaagtcttgctgaaggtgcttgcgtaagtggcacatggatgttccctctgttcaaaggcatatgcacaacactatttttcaaaatttgcttttatttacacgtttgagtcaattacatgcatgttttatttttgaggagtgattagcaaaatgcattaaaattttaaaatagcaattaaatatacaaaaatatagcttacaaaaaactgcgaatgtttaaaaatattctgctgcagaatttttagtgtacaaagacgtctatgaaacctgaggttcagcatttcataaacctttttttgagggagttacacaatacctagtgaggaaacccgagggccaaactacaagacgaaaaagtgccccgttcctggcaatgatgtcagaagaccaagaggcgatagttaccagcaacactctaggaagaccagctgtcaccagaagggagttcctaacacttgccacacctgctcccccgaccgggggcctgggagggaagggcagatggagaggaacggtgtgcagtgggcgtgagatgcagatccaccaggcttgggactggcaaagggagctgagaagagagttcccccaaagcacaaacaagtctgctgacactggtggggcccttacagtcacagaagtaaggactggatggtaagccaaaggtgctgatgcttggtcaaaaagtggagtacatctttgcatcttgtaacaatttgggctctacagctgaattggcaaagtaaggtttactacacaagcccctctttttcttctgatatccccactcaaatggaagcacactccccagcacatggggatcccttattaatctttactaaagaaccgtgaaccagcattttccagttatcaactggatatttaggcatgaatctggacatgtccatctgcttaagaaatctgcttaagaaatctgtaacagctacaggaaaagacacacccagggccagagattctacaaatgccagaagagtggatgtgatagagaattttttctcaagttttgggttagggcaccagttgcaattttaatccaggggaggatctgggctgctgctgtagggggcaagtacaccagggaggtgggtgtggacagaggcactgggcagctgctgggaagcgaggcacaagtctgtgcccctactcccagggctgcctggaggaagcagctctaactttcatcagcggggacaaaaatgaacttaaactaaaaaaattattggccgggcgcagtggctcacgcctgtaatcccagcactttgggaggtcaaggcaggtgcatcacgaggtcaggagatcgagaccatcctggctaacacggtgaaactccgtctgtactaaaaatacaaaaaattagccgagcgtggtggcgggcacctgttgtcccagctcccgaggcgggagaatggcgtgaacctgggaggcggagcttgcagtgggccaagatcgtgccactgcattccagcctgggtgacagagcgagactccgtctc

SEQ ID NO: 10685 - protein, 279 aa, Homo sapiens; identical to SEQ ID NO: 1641

SEQ ID NO: 10686 - DNA, 1385 bp, Homo sapiens
cccgcgcgcggacactgtccccgcacggtggtccctcgttggtgcgtggcctgacatccggctggaggcctcgggtgctccgaaagcggtaccttcgggggcccccccgcacccattgtttttccatggtttggactggatatcggtggaactctggtcaagctggtatattttgaacccaaagacatcactgctgaagaagaagaggaagaagtggaaagtcttaaaagcattcggaagtacctgacctccaatgtggcttatgggtctacaggcattcgggacgtgcacctcgagctgaaggacctgactctgtgtggacgcaaagataggtgatcttcagctttgcaaactggatgaactagattgcttgatcaaaggaattttatacattgactcagtcggattcaatggacggtcacagtgctattactttgaaaaccctgctgattctgaaaagtgtcagaagttaccatttgatttgaaaaatccgtatcctctgcttctggtgaacattggctcaggggttagcatcttagcagtatattccaaagataattacaaacgggtcacaggtactagtcttggaggaggaactttttttggtctctgctgtcttcttactggctgtaccacttttgaagaagctcttgaaatggcatctcgtggagatagcaccaaagtggataaactagtacgagatatttatggaggggactatgagaggtttggactgccaggctgggctgtggcttcaagctttggaaacatgatgagcaaggagaagcgagaggctgtcagtaaagaggacctggccagagcgactttgatcaccatcaccaacaacattggctcaatagcaagaatgtgtgcccttaatgaaaacattaaccaggtggtatttgttggaaatttcttgagaattaatacgatcgccatgcggcttttggcatatgctttggattattggtccaaggggcagttgaaagcacttttttcggaacacgagggttattttggagctgttggagcactccttgagctgttgaagatcccgtgatcattacctggggaggggttcctgaaaccttccacaatgggatctgtggactttcatttttttaagagacttactcaatttcatgactgtactacctgaaacaaagtgagaaaggacaggtgtatttttctaagtcatcaagataaatccttaagaattcagtctaaattagcaaccaggaaggaaaaatatattaaaaacaacaaaaaagtggcacatgtccaggcagtgtgaggatttgctgtatataagttgcctgctttgtatttttgaaatctctgcatcactcattggaagtgcttctgaagagagctgctctgtgttc

SEQ ID NO: 10687 - protein, 134 aa, Homo sapiens
MASRGDSTKVDKLVRDIYGGDYERFGLPGWAVASSFGNMMSKEKREAVSKEDLARATLITITNNIGSIARMCALNENINQVVFVGNFLRINTIAMRLLAYALDYWSKGQLKALFSEHEGYFGAVGALLELLKIP

SEQ ID NO: 10688 - DNA, 1311 bp, Homo sapiens
ccttgtggaactttgatgattattttattttatttttttatttaagttctaggatacatgtgcacaacgcgcaggtttgttacatacgtatacatgtgccatgttggtgtgctgcacccattaactcgtcatttacattaagtatatctcctaatgctatccctcccccctccccccaccccatggcaggccctggtgtgggatgttccccttcctgtgtccaagtgttctcattgttcagttcagaactttgattattttagcctctctgagccttgaaatattttcttgccctcacattgaagtcactttaacttttgttgtgaaagcttcgtatagattctctcaagcgtttcctctttgatcctttattctcatcttagcacgttgtagtttataaccacctgtttctgtcttgatagtagcatcctagtcttcagtggaccccccccatatatatatataatggttaactgtatcttctatatttttattataaaataaaaggtacagaaagctgcctaaaacaaactgtatagtgaactattaagacaaacagccttgcctctgtatttcagctgtgccttgtcctgtagctgctggccgcctcacatcacagattggtgtggctgcctttattttatttatacacaccaaaaccaaagatggtcaatatgcctttcttttttttgttttttgagatggggtcttactctgtcagccaggctggagtgcagtggcgcagtctcggctcactttaacttctgcctcctgggttcaagtgattctcttgtctaagcctcctgagtagatgggactacaggcacgtgccaccgcaccttccacaatgggatctgtggactttcatttttttaagagacttactcaatttcatgactgtactacctgaaacaaagtgagaaaggacaggtgtatttttctaagtcatcaagataaatccttaagaattcagtctaaattagcaaccaggaaggaaaaatatattaaaaacaacaaaaaagtggcacatgtccaggcagtgtgaggatttgctgtatataagttgcctgctttgtatttttgaaatctctgcatcactcattggaagtgcttctgaagagagctgctctgtgttcagttgactggttttgtgtcctgtttgaacttgctgaatgtaaggcaggctactatgcgttataatctaatcacaatttgtcaatatggtcttggcaatcatctgtgcattactctggtttgcattaagcctgtgtgtgaacttactgtaaaacatgttttatttcaaggttctgc

SEQ ID NO: 10689 - protein, 32 aa, Homo sapiens
MGLQARATAPSTMGSVDFHFFKRLTQFHDCTT

SEQ ID NO: 10690 - DNA, 1372 bp, Homo sapiens
ccttgtggaactttgatgattattttattttatttttttatttaagttctaggatacatgtgcacaacgcgcaggtttgttacatacgtatacatgtgccatgttggtgtgctgcacccattaactcgtcatttacattaagtatatctcctaatgctatccctcccccctccccccaccccatggcaggccctggtgtgggatgttccccttcctgtgtccaagtgttctcattgttcagttcagaactttgattattttagcctctctgagccttgaaatattttcttgccctcacattgaagtcactttaacttttgttgtgaaagcttcgtatagattctctcaagcgtttcctctttgatcctttattctcatcttagcacgttgtagtttataaccacctgtttctgtcttgatagtagcatcctagtcttcagtggaccccccccatatatatatataatggttaactgtatcttctatatttttattataaaataaaaggtacagaaagctgcctaaaacaaactgtatagtgaactattaagacaaacagccttgcctctgtatttcagctgtgccttgtcctgtagctgctggccgcctcacatcacagattggtgtggctgcctttattttatttatacacaccaaaaccaaagatggtcaatatgcctttcttttttttgttttttgagatggggtcttactctgtcagccaggctggagtgcagtggcgcagtctcggctcactttaacttctgcctcctgggttcaagtgattctcttgtctaagcctcctgagtagatgggactacaggcacgtgccaccgcaccttccacaatgggatctgtggactttcatttttttaagagacttactcaatttcatgactgtactacctgaaacaaagtgagaaaggacaggtgtatttttctaagtcatcaagataaatccttaagaattcagtctaaattagcaaccaggaaggaaaaatatattaaaaacaacaaaaaagtggcacatgtccaggcagtgtgaggatttgctgtatataagttgcctgctttgtatttttgaaatctctgcatcactcattggaagtgcttctgaagagagctgctctgtgttcagttgactggttttgtgtcctgtttgaacttgctgaatgtaaggcaggctactatgcgttataatctaatcacaatttgtcaatatggtcttggcaatcatctgtgcattactctggtttgcattaagcctgtgtgtgaacttactgtaaaacatgttttatttcaaggttctgcaaaattaattgggcaggttaattgtgtacctgaaacttaacaagcagtttttggaagggca

SEQ ID NO: 10691 - protein, 32 aa, Homo sapiens; identical to SEQ ID NO: 10689

SEQ ID NO: 10692 - DNA, 350 bp, Homo sapiens
agagccatcccagaaatcagaatacaaaatgtgaacccagaattgggggatgtttttgcaatcacactcctgttgagtaagacatattttcattttattgcaacatactgaaattttagttttctgtacaaatcagaatctgcagtccctcccttaccccaaatgcccagctaatccaagagcacaaccagatttttctgattgactttctatctgcgacaggatgctcaagatcaggctctgtagctgacagcagtggcacaggcctctcccagctctgagcagcctcggtctccatgggaagtgagcaagttcacaggagttggcccagggagcagcaccctgtggta

SEQ ID NO: 10693 - protein, 33 aa, Homo sapiens
LTAVAQASPSSEQPRSPWEVSKFTGVGPGSSTL

SEQ ID NO: 10694 - DNA, 2947 bp, Homo sapiens
tgctccctgcatctgggtcctccaccaggatgggcctgcgcatctgcattgctgtacagacaaacaggccttttaatttacatcctcctttaattctcattaaaatcgcagggtttttgtttgaaagacagtcctttttttatttattttgaaaaaggaatgagttagggacccctttataactctcttggctcagactcgaaccccatggtaaagtcaccctttccgcatctatcttcaggagttgctgggacttgttactgtgtagctgcgtggggattctggtctgctcttggaccactggctggtatcctttgtgtgtttcttaagcagctcaaagatagaatgttgctggtctgctatgggttagtggagcataactcagccccaactggactccacgggtggctgaaccattagtagttgctaggggtacaactgaattcaactgccttcagaaacagggaacaaaaccagcctgacttgattcctggttgggtcagtatcagacactaggaagttgacatctgctgcttttctttgccacgtgtgatttggttaggcctgtccctggcagataaggtccttgaagcctatgcttgcctagccagggaaggcaggacagaaatggccaaataggggcaggtggcccctgggaaggtctgagctgagggatacaggggacctcccaccattgccggataccctgttcttgacaagaagatccttttccccagtgccaagccccttggatccatcagagaaatagcctcgggccttgtcctttttcacaaccccacttcaaaatcatgtcatctccctggcctgatcccgctctaagctactttgaacaactaggaattatttttctcagaggctttttgggcattatgaaatacatcctgatacatccagggcagtatacccagagctccaggcagagagtgatggaatcacctcttgtcactcactagccttaggcccttctgcaggttagcctctcagtctcttccttagcttccttagctaccacccagggattgtagtaacgtccctggcacctcttgtgggggttagctggtgcccagagcctggtaggcagcaggcctggtgtcatgggggctgctgataccacataacatcatctgggttacatgggctcctctgccatcatgattgataggaacagaacctcagccaaaaagcttcctgagctgtaggggctttccctgaggcccaggttcacctggcccctttcttccttggtcatctctgcctttgcccacagtgaactctgacttggttgttcagtgctgaatatttctttcttaatgttttgaataggtaatccattcatgtggttcacaaatcataaagtagttaaaagcctttcttgagttcctgatgcctagcaagctccgctcctcactccatgaatacctactattggtttgttccttgggtatccttccagagatcatttatgcatgtacacacatgtgtatgtgtgtctatataatttttctccttttctactcatgtgataccagacaagtgtattcaaggaacgctcctactaatgtgggaagagccatcccagaaatcagaatacaaaatgtgaacccagaattgggggatgtttttgcaatcacactcctgttgagtaagacatattttcattttattgcaacatactgaaattttagttttctgtacaaatcagaatctgcagtccctcccttaccccaaattgctgggattacaggcgtgagccactgcgcccggccaataatttttttagtttaagttcatttttgtccccgctgatgaaagttagagctgcttcctccaggcagccctgggagtaggggcacagacttgtgcctcgcttcccagcagctgcccagtgcctctgtccacacccacctccctggtgtacttgccccctacagcagcagcccagatcctcccctggattaaaattgcaactggtgccctaacccaaaacttgagaaaaaattctctatcacatccactcttctggcatttgtagaatctctggccctgggtgtgtcttttcctgtagctgttacagatttcttaagcagatttcttaagcagatggacatgtccagattcatgcctaaatatccagttgataactggaaaatgctggttcacggttctttagtaaagattaataagggatccccatgtgctggggagtgtgcttccatttgagtggggatatcagaagaaaaagaggggcttgtgtagtaaaccttactttgccaattcagctgtagagcccaaattgttacaagatgcaaagatgtactccactttttgaccaagcatcagcacctttggcttaccatccagtccttacttctgtgactgtaagggccccaccagtgtcagcagacttgtttgtgctttgggggaactctcttctcagctccctttgccagtcccaagcctggtggatctgcatctcacgcccactgcacaccgttcctctccatctgcccttccctcccaggcccccggtcgggggagcaggtgtggcaagtgttaggaactcccttctggtgacagctggtcttcctagagtgttgctggtaactatcgcctcttggtcttctgacatcattgccaggaacggggcactttttcgtcttgtagtttggccctcgggtttcctcactaggtattgtgtaactccctcaaaaaaaggtttatgaaatgctgaacctcaggtttcatagacgtctttgtacactaaaaattctgcagcagaatatttttaaacattcgcagttttttgtaagctatatttttgtatatttaattgctattttaaaattttaatgcattttgctaatcactcctcaaaaataaaacatgcatgtaattgactcaaacgtgtaaataaaagcaaattttg

SEQ ID NO: 10695 - protein, 139 aa, Homo sapiens
MQRCTPLFDQASAPLAYHPVLTSVTVRAPPVSADLFVLWGNSLLSSLCQSQAWWICISRPLHTVPLHLPFPPRPPVGGAGVASVRNSLLVTAGLPRVLLVTIASWSSDIIARNGALFRLVVWPSGFLTRYCVTPSKKGL

SEQ ID NO: 10696 - DNA, 5627 bp, Homo sapiens
ggccgccgcccccgggctggggtttgggggaccgagccgctccgggttcgggatgctgaggagaccgcgggcccgcgccagcctcccacacacacacactctcccggcgcctcggccggccgggcgcggtgtgcaggggtgaggcggtgtctccaggctgaggagggacgcggaggagggtccggcgcggccccgggactggagggtgagtccctcacaaagggcggagcggggctgtcacctggagatcacggagggaagttcatccatgagctcggatttcccacattacaacttcaggatgcctaatattggattccagaatctgcctctcaacatatatattgtggtttttggtactgctatatttgtcttcatccttagtttactcttctgttgctacttgattaggctaagacatcaagcacacaaagaattttatgcctacaaacaggttatattaaaagagaaagtaaaagaattgaatttacatgagctctgtgcagtgtgcctagaagacttcaagcctcgagatgagttggggatttgcccatgtaagcacgccttccacagaaagtgccttattaagtggctggaggttcgtaaagtgtgtcccctgtgcaacatgccagttctacagctggcccagttgcacagtaagcaggaccgtggaccccctcaggggccccttcctggggcagagaacattgtatagcttaccgcaaggatcagactgttgctggacacgacgtctgtgtggagccaggaggaacacatgtggtgtctgtatggctgctctctacctaggacaccagctgccacttcttttgcctcatgaagaactcttgggccagccaaactgggaacctaggtgtctgggtcttgtgacaaccaaagcactttgacactaccccctgccgagagaagaggagtggatgagcctgcgggtttgcctcaagaaacttcatgagggtctcttactaactccattacactctctctcctggagcctcatctccatgtcaagcaggagggtaaagaagggaactaagagcaggtctttcaagccacacccccacctgcggatggatgggtttctctgtaggccatgcaggcctttgtcgcagcaaaccttcccagcagcccttgagccaagtaaaaccagcacaaccagccaccagtggttggtgaggcagtgcccacaaggctcatgttgtatgcctttgataaggccatcttggctttgagtagcagtgttcctcgtcacccatttccccctcaggattacaacacctgctatcaaatcatctaagctgaaaacatgagatgcgcttggaaaggcctagtcagaagccatttcctcttatcatttccctctcctatgcaccagtaaggcccgtccagagccccagcagggagtgggccctgagtccacactgtccctgagtgatccaggaggctgcccacatccccacatgtgcactgtggttccagtgtagctgctgtgagcccactgccactgcctcagaagggagccactgtgaacctctcgagtggctccaaagagcagtggctttttgagaatggcccatacttctggcccggctggatgaagggaatgccgaccctttggcctctccccctccttccatctcttctctctcttgccctatctctctttctacttcagaaaaaaaaaaaaaaaaaaaaaaaagcctgtcattcactttttaacactttatcccaaataagatccctgtgtaattctgaagctggtgatccacttggaattgtagatagtttcaggaagctcctgcagggctgtccaccgttggtgtgtgcctcagtatttggacttccgaaactgaaagtgaaagtgtctttataggagagaaacgcatgctgctctttggctctttctgtccaacttttctagaaatgactcaaagtccattaagatttgtgaatattgtataaattagctatggaaagtagcaggtcagatggaaaattcttttccacagccctgctctccgcctccctccatcttaggagcgcctgcctcaattcctcgtcaactgctttgctccactccatcccacaggtgtgagtgggggaagtttttcattaggaatacagtctgcgtgacatggagaatggatggagggagctttgctactctgctcttggcatgactccaggatttttttctggaatccaacctctgtcctcttaggagaaggaacctgtccttggttcagatggctgggcatgaggaggaaaatttccattagtgtagaacagtgctggacagaatccggtttggaaaattacaaatccagttggtcaaaataggccatttcctatgtgtgacctattcgtggtatgccaactggactgcttcctaaacaggacgaggaaagtgaggaatatttttatatgaaagccttagcctgtctggcacccatgaaaaaaactatttatgcactcctactttcaccgtctttttgcattctctatttgtagcacaacagagttgaatgccacaaaacaccccgtttatagtgagctgttttcagtgaccaatatcagaaggaggcttgcttctggactagcctcactaattgccagcagccaccattttccatggaatggccttgggacagatgtcacctctgttatggggctctaataggaaagagaatgttttttcccttcctatgatcaatactgcaaattattgctgctcacagcttttataggattctcccaactgaaagttgcaggctttttctgtccctgtgcatcagtactaacaaaagacagcctcaccaagtctgtatatttgaacagaggcaagttaattcatccccccgtgtcagagccacaggcatgttgagggggttgatacgtagcactggaccagggcgcaaagcccagatagttccagccatgagaggagagcacaagaatgctctgcactctgcactcagcaccaccttgggtctgctttgcccagatgagggaccactaacaaccttctcagcacatgtgaatgtggactggttttaaaatgcattcattctgctaggattgggctggaagctggaacagtgagagtactttttctgctcctagtcatctccctttctcagcgtgacatcctcctgcagcaagcctagtatcactagcagtagttcctgcgactcttagcaacacaacccgaatatttgctccctgcatctgggtcctccaccaggatgggcctgcgcatctgcattgctgtacagacaaacaggccttttaatttacatcctcctttaattctcattaaaatcgcagggtttttgtttgaaagacagtcctttttttatttattttgaaaaaggaatgagttagggacccctttataactctcttggctcagactcgaaccccatggtaaagtcaccctttccgcatctatcttcaggagttgctgggacttgttactgtgtagctgcgtggggattctggtctgctcttggaccactggctggtatcctttgtgtgtttcttaagcagctcaaagatagaatgttgctggtctgctatgggttagtggagcataactcagccccaactggactccacgggtggctgaaccattagtagttgctaggggtacaactgaattcaactgccttcagaaacagggaacaaaaccagcctgacttgattcctggttgggtcagtatcagacactaggaagttgacatctgctgcttttctttgccacgtgtgatttggttaggcctgtccctggcagataaggtccttgaagcctatgcttgcctagccagggaaggcaggacagaaatggccaaataggggcaggtggcccctgggaaggtctgagctgagggatacaggggacctcccaccattgccggataccctgttcttgacaagaagatccttttccccagtgccaagccccttggatccatcagagaaatagcctcgggccttgtcctttttcacaaccccacttcaaaatcatgtcatctccctggcctgatcccgctctaagctactttgaacaactaggaattatttttctcagaggctttttgggcattatgaaatacatcctgatacatccagggcagtatacccagagctccaggcagagagtgatggaatcacctcttgtcactcactagccttaggcccttctgcaggttagcctctcagtctcttccttagcttccttagctaccacccagggattgtagtaacgtccctggcacctcttgtgggggttagctggtgcccagagcctggtaggcagcaggcctggtgtcatgggggctgctgataccacataacatcatctgggttacatgggctcctctgccatcatgattgataggaacagaacctcagccaaaaagcttcctgagctgtaggggctttccctgaggcccaggttcacctggcccctttcttccttggtcatctctgcctttgcccacagtgaactctgacttggttgttcagtgctgaatatttctttcttaatgttttgaataggtaatccattcatgtggttcacaaatcataaagtagttaaaagcctttcttgagttcctgatgcctagcaagctccgctcctcactccatgaatacctactattggtttgttccttgggtatccttccagagatcatttatgcatgtacacacatgtgtatgtgtgtctatataatttttctccttttctactcatgtgataccagacaagtgtattcaaggaacgctcctactaatgtgggaagagccatcccagaaatcagaatacaaaatgtgaacccagaattgggggatgtttttgcaatcacactcctgttgagtaagacatattttcattttattgcaacatactgaaattttagttttctgtacaaatcagaatctgcagtccctcccttaccccaaatgcccagctaatccaagagcacaaccagatttttctgattgactttctatctgcgacaggatgctcaagatcaggctctgtagctgacagcagtggcacaggcctctcccagctctgagcagcctctgcaggtgcctggacagctgctggcccctcccctaccttggccagttccaagtgaggaccagtggtgatgtgtggctgcaactgttgtggtcacttaggcaagctcttgtgtctttgatgcaggagtttgagcagcagcaactgaaggcttctattttgtggggcagacatcttagctactgagcaagtgcacagtgagtctcatgtggatatgcctgaatgtccagcgtcagttcatggagctactccctttccctcccaacttttcgttgttgttgagacagggtcttgttacccagactggagtgcagtggcaccattgtagctcactgcagcctcaacttcctggactcaagtgatcctcccgcctcagtctgtagctgcgtctacaggtgcacaccagcacacctggctaattttcgtaattatttttttgtagagacaggtctcaactcactatgttgcccaggctggcctcctcactctgtgcacacactttgaaaagaaaatgcttctggtc

SEQ ID NO: 10697 - protein, 148 aa, Homo sapiens; identical to SEQ ID NO: 1647

SEQ ID NO: 10698 - DNA, 5544 bp, Homo sapiens
gccacctccgccgcgctctgtccggacggacgctcgccgcccgcagcctgccgcccgccgcagggcgctgacggtcccgcacgtctgccgctgccaccggcgcgcccgaaacttccagcactatgttgaataagagtggtgagagcagatatcctgccttgttcccggtcttagggggttcatccatgagctcggatttcccacattacaacttcaggatgcctaatattggattccagaatctgcctctcaacatatatattgtggtttttggtactgctatatttgtcttcatccttagtttactcttctgttgctacttgattaggctaagacatcaagcacacaaagaattttatgcctacaaacaggttatattaaaagagaaagtaaaagaattgaatttacatgagctctgtgcagtgtgcctagaagacttcaagcctcgagatgagttggggatttgcccatgtaagcacgccttccacagaaagtgccttattaagtggctggaggttcgtaaagtgtgtcccctgtgcaacatgccagttctacagctggcccagttgcacagtaagcaggaccgtggaccccctcaggggccccttcctggggcagagaacattgtatagcttaccgcaaggatcagactgttgctggacacgacgtctgtgtggagccaggaggaacacatgtggtgtctgtatggctgctctctacctaggacaccagctgccacttcttttgcctcatgaagaactcttgggccagccaaactgggaacctaggtgtctgggtcttgtgacaaccaaagcactttgacactaccccctgccgagagaagaggagtggatgagcctgcgggtttgcctcaagaaacttcatgagggtctcttactaactccattacactctctctcctggagcctcatctccatgtcaagcaggagggtaaagaagggaactaagagcaggtctttcaagccacacccccacctgcggatggatgggtttctctgtaggccatgcaggcctttgtcgcagcaaaccttcccagcagcccttgagccaagtaaaaccagcacaaccagccaccagtggttggtgaggcagtgcccacaaggctcatgttgtatgcctttgataaggccatcttggctttgagtagcagtgttcctcgtcacccatttccccctcaggattacaacacctgctatcaaatcatctaagctgaaaacatgagatgcgcttggaaaggcctagtcagaagccatttcctcttatcatttccctctcctatgcaccagtaaggcccgtccagagccccagcagggagtgggccctgagtccacactgtccctgagtgatccaggaggctgcccacatccccacatgtgcactgtggttccagtgtagctgctgtgagcccactgccactgcctcagaagggagccactgtgaacctctcgagtggctccaaagagcagtggctttttgagaatggcccatacttctggcccggctggatgaagggaatgccgaccctttggcctctccccctccttccatctcttctctctcttgccctatctctctttctacttcagaaaaaaaaaaaaaaaaaaaaaaaagcctgtcattcactttttaacactttatcccaaataagatccctgtgtaattctgaagctggtgatccacttggaattgtagatagtttcaggaagctcctgcagggctgtccaccgttggtgtgtgcctcagtatttggacttccgaaactgaaagtgaaagtgtctttataggagagaaacgcatgctgctctttggctctttctgtccaacttttctagaaatgactcaaagtccattaagatttgtgaatattgtataaattagctatggaaagtagcaggtcagatggaaaattcttttccacagccctgctctccgcctccctccatcttaggagcgcctgcctcaattcctcgtcaactgctttgctccactccatcccacaggtgtgagtgggggaagtttttcattaggaatacagtctgcgtgacatggagaatggatggagggagctttgctactctgctcttggcatgactccaggatttttttctggaatccaacctctgtcctcttaggagaaggaacctgtccttggttcagatggctgggcatgaggaggaaaatttccattagtgtagaacagtgctggacagaatccggtttggaaaattacaaatccagttggtcaaaataggccatttcctatgtgtgacctattcgtggtatgccaactggactgcttcctaaacaggacgaggaaagtgaggaatatttttatatgaaagccttagcctgtctggcacccatgaaaaaaactatttatgcactcctactttcaccgtctttttgcattctctatttgtagcacaacagagttgaatgccacaaaacaccccgtttatagtgagctgttttcagtgaccaatatcagaaggaggcttgcttctggactagcctcactaattgccagcagccaccattttccatggaatggccttgggacagatgtcacctctgttatggggctctaataggaaagagaatgttttttcccttcctatgatcaatactgcaaattattgctgctcacagcttttataggattctcccaactgaaagttgcaggctttttctgtccctgtgcatcagtactaacaaaagacagcctcaccaagtctgtatatttgaacagaggcaagttaattcatccccccgtgtcagagccacaggcatgttgagggggttgatacgtagcactggaccagggcgcaaagcccagatagttccagccatgagaggagagcacaagaatgctctgcactctgcactcagcaccaccttgggtctgctttgcccagatgagggaccactaacaaccttctcagcacatgtgaatgtggactggttttaaaatgcattcattctgctaggattgggctggaagctggaacagtgagagtactttttctgctcctagtcatctccctttctcagcgtgacatcctcctgcagcaagcctagtatcactagcagtagttcctgcgactcttagcaacacaacccgaatatttgctccctgcatctgggtcctccaccaggatgggcctgcgcatctgcattgctgtacagacaaacaggccttttaatttacatcctcctttaattctcattaaaatcgcagggtttttgtttgaaagacagtcctttttttatttattttgaaaaaggaatgagttagggacccctttataactctcttggctcagactcgaaccccatggtaaagtcaccctttccgcatctatcttcaggagttgctgggacttgttactgtgtagctgcgtggggattctggtctgctcttggaccactggctggtatcctttgtgtgtttcttaagcagctcaaagatagaatgttgctggtctgctatgggttagtggagcataactcagccccaactggactccacgggtggctgaaccattagtagttgctaggggtacaactgaattcaactgccttcagaaacagggaacaaaaccagcctgacttgattcctggttgggtcagtatcagacactaggaagttgacatctgctgcttttctttgccacgtgtgatttggttaggcctgtccctggcagataaggtccttgaagcctatgcttgcctagccagggaaggcaggacagaaatggccaaataggggcaggtggcccctgggaaggtctgagctgagggatacaggggacctcccaccattgccggataccctgttcttgacaagaagatccttttccccagtgccaagccccttggatccatcagagaaatagcctcgggccttgtcctttttcacaaccccacttcaaaatcatgtcatctccctggcctgatcccgctctaagctactttgaacaactaggaattatttttctcagaggctttttgggcattatgaaatacatcctgatacatccagggcagtatacccagagctccaggcagagagtgatggaatcacctcttgtcactcactagccttaggcccttctgcaggttagcctctcagtctcttccttagcttccttagctaccacccagggattgtagtaacgtccctggcacctcttgtgggggttagctggtgcccagagcctggtaggcagcaggcctggtgtcatgggggctgctgataccacataacatcatctgggttacatgggctcctctgccatcatgattgataggaacagaacctcagccaaaaagcttcctgagctgtaggggctttccctgaggcccaggttcacctggcccctttcttccttggtcatctctgcctttgcccacagtgaactctgacttggttgttcagtgctgaatatttctttcttaatgttttgaataggtaatccattcatgtggttcacaaatcataaagtagttaaaagcctttcttgagttcctgatgcctagcaagctccgctcctcactccatgaatacctactattggtttgttccttgggtatccttccagagatcatttatgcatgtacacacatgtgtatgtgtgtctatataatttttctccttttctactcatgtgataccagacaagtgtattcaaggaacgctcctactaatgtgggaagagccatcccagaaatcagaatacaaaatgtgaacccagaattgggggatgtttttgcaatcacactcctgttgagtaagacatattttcattttattgcaacatactgaaattttagttttctgtacaaatcagaatctgcagtccctcccttaccccaaatgcccagctaatccaagagcacaaccagatttttctgattgactttctatctgcgacaggatgctcaagatcaggctctgtagctgacagcagtggcacaggcctctcccagctctgagcagcctctgcaggtgcctggacagctgctggcccctcccctaccttggccagttccaagtgaggaccagtggtgatgtgtggctgcaactgttgtggtcacttaggcaagctcttgtgtctttgatgcaggagtttgagcagcagcaactgaaggcttctattttgtggggcagacatcttagctactgagcaagtgcacagtgagtctcatgtggatatgcctgaatgtccagcgtcagttcatggagctactccctttccctcccaacttttcgttgttgttgagacagggtcttgttacccagactggagtgcagtggcaccattgtagctcactgcagcctcaacttcctggactcaagtgatcctcccgcctcagtctgtagctgcgtctacaggtgcacaccagcacacctggctaattttcgtaattatttttttgtagagacaggtctcaactcactatgttgcccaggctggcctcctcactctgtgcacacactttgaaaagaaaatgcttctggtc

SEQ ID NO: 10699 - protein, 169 aa, Homo sapiens
MLNKSGESRYPALFPVLGGSSMSSDFPHYNFRMPNIGFQNLPLNIYIVVFGTAIFVFILSLLFCCYLIRLRHQAHKEFYAYKQVILKEKVKELNLHELCAVCLEDFKPRDELGICPCKHAFHRKCLIKWLEVRKVCPLCNMPVLQLAQLHSKQDRGPPQGPLPGAENIV

SEQ ID NO: 10700 - DNA, 5512 bp, Homo sapiens
gcccctcgcgaggggccgccgggcgcagtcagccgccgccacctccgccgcgctctgtccggacggacgctcgccgcccgcagcctgccgcccgccgcagggcgctgacggtcccgcacgtctgccgctgccaccggcgcgcccgattcatccatgagctcggatttcccacattacaacttcaggatgcctaatattggattccagaatctgcctctcaacatatatattgtggtttttggtactgctatatttgtcttcatccttagtttactcttctgttgctacttgattaggctaagacatcaagcacacaaagaattttatgcctacaaacaggttatattaaaagagaaagtaaaagaattgaatttacatgagctctgtgcagtgtgcctagaagacttcaagcctcgagatgagttggggatttgcccatgtaagcacgccttccacagaaagtgccttattaagtggctggaggttcgtaaagtgtgtcccctgtgcaacatgccagttctacagctggcccagttgcacagtaagcaggaccgtggaccccctcaggggccccttcctggggcagagaacattgtatagcttaccgcaaggatcagactgttgctggacacgacgtctgtgtggagccaggaggaacacatgtggtgtctgtatggctgctctctacctaggacaccagctgccacttcttttgcctcatgaagaactcttgggccagccaaactgggaacctaggtgtctgggtcttgtgacaaccaaagcactttgacactaccccctgccgagagaagaggagtggatgagcctgcgggtttgcctcaagaaacttcatgagggtctcttactaactccattacactctctctcctggagcctcatctccatgtcaagcaggagggtaaagaagggaactaagagcaggtctttcaagccacacccccacctgcggatggatgggtttctctgtaggccatgcaggcctttgtcgcagcaaaccttcccagcagcccttgagccaagtaaaaccagcacaaccagccaccagtggttggtgaggcagtgcccacaaggctcatgttgtatgcctttgataaggccatcttggctttgagtagcagtgttcctcgtcacccatttccccctcaggattacaacacctgctatcaaatcatctaagctgaaaacatgagatgcgcttggaaaggcctagtcagaagccatttcctcttatcatttccctctcctatgcaccagtaaggcccgtccagagccccagcagggagtgggccctgagtccacactgtccctgagtgatccaggaggctgcccacatccccacatgtgcactgtggttccagtgtagctgctgtgagcccactgccactgcctcagaagggagccactgtgaacctctcgagtggctccaaagagcagtggctttttgagaatggcccatacttctggcccggctggatgaagggaatgccgaccctttggcctctccccctccttccatctcttctctctcttgccctatctctctttctacttcagaaaaaaaaaaaaaaaaaaaaaaaagcctgtcattcactttttaacactttatcccaaataagatccctgtgtaattctgaagctggtgatccacttggaattgtagatagtttcaggaagctcctgcagggctgtccaccgttggtgtgtgcctcagtatttggacttccgaaactgaaagtgaaagtgtctttataggagagaaacgcatgctgctctttggctctttctgtccaacttttctagaaatgactcaaagtccattaagatttgtgaatattgtataaattagctatggaaagtagcaggtcagatggaaaattcttttccacagccctgctctccgcctccctccatcttaggagcgcctgcctcaattcctcgtcaactgctttgctccactccatcccacaggtgtgagtgggggaagtttttcattaggaatacagtctgcgtgacatggagaatggatggagggagctttgctactctgctcttggcatgactccaggatttttttctggaatccaacctctgtcctcttaggagaaggaacctgtccttggttcagatggctgggcatgaggaggaaaatttccattagtgtagaacagtgctggacagaatccggtttggaaaattacaaatccagttggtcaaaataggccatttcctatgtgtgacctattcgtggtatgccaactggactgcttcctaaacaggacgaggaaagtgaggaatatttttatatgaaagccttagcctgtctggcacccatgaaaaaaactatttatgcactcctactttcaccgtctttttgcattctctatttgtagcacaacagagttgaatgccacaaaacaccccgtttatagtgagctgttttcagtgaccaatatcagaaggaggcttgcttctggactagcctcactaattgccagcagccaccattttccatggaatggccttgggacagatgtcacctctgttatggggctctaataggaaagagaatgttttttcccttcctatgatcaatactgcaaattattgctgctcacagcttttataggattctcccaactgaaagttgcaggctttttctgtccctgtgcatcagtactaacaaaagacagcctcaccaagtctgtatatttgaacagaggcaagttaattcatccccccgtgtcagagccacaggcatgttgagggggttgatacgtagcactggaccagggcgcaaagcccagatagttccagccatgagaggagagcacaagaatgctctgcactctgcactcagcaccaccttgggtctgctttgcccagatgagggaccactaacaaccttctcagcacatgtgaatgtggactggttttaaaatgcattcattctgctaggattgggctggaagctggaacagtgagagtactttttctgctcctagtcatctccctttctcagcgtgacatcctcctgcagcaagcctagtatcactagcagtagttcctgcgactcttagcaacacaacccgaatatttgctccctgcatctgggtcctccaccaggatgggcctgcgcatctgcattgctgtacagacaaacaggccttttaatttacatcctcctttaattctcattaaaatcgcagggtttttgtttgaaagacagtcctttttttatttattttgaaaaaggaatgagttagggacccctttataactctcttggctcagactcgaaccccatggtaaagtcaccctttccgcatctatcttcaggagttgctgggacttgttactgtgtagctgcgtggggattctggtctgctcttggaccactggctggtatcctttgtgtgtttcttaagcagctcaaagatagaatgttgctggtctgctatgggttagtggagcataactcagccccaactggactccacgggtggctgaaccattagtagttgctaggggtacaactgaattcaactgccttcagaaacagggaacaaaaccagcctgacttgattcctggttgggtcagtatcagacactaggaagttgacatctgctgcttttctttgccacgtgtgatttggttaggcctgtccctggcagataaggtccttgaagcctatgcttgcctagccagggaaggcaggacagaaatggccaaataggggcaggtggcccctgggaaggtctgagctgagggatacaggggacctcccaccattgccggataccctgttcttgacaagaagatccttttccccagtgccaagccccttggatccatcagagaaatagcctcgggccttgtcctttttcacaaccccacttcaaaatcatgtcatctccctggcctgatcccgctctaagctactttgaacaactaggaattatttttctcagaggctttttgggcattatgaaatacatcctgatacatccagggcagtatacccagagctccaggcagagagtgatggaatcacctcttgtcactcactagccttaggcccttctgcaggttagcctctcagtctcttccttagcttccttagctaccacccagggattgtagtaacgtccctggcacctcttgtgggggttagctggtgcccagagcctggtaggcagcaggcctggtgtcatgggggctgctgataccacataacatcatctgggttacatgggctcctctgccatcatgattgataggaacagaacctcagccaaaaagcttcctgagctgtaggggctttccctgaggcccaggttcacctggcccctttcttccttggtcatctctgcctttgcccacagtgaactctgacttggttgttcagtgctgaatatttctttcttaatgttttgaataggtaatccattcatgtggttcacaaatcataaagtagttaaaagcctttcttgagttcctgatgcctagcaagctccgctcctcactccatgaatacctactattggtttgttccttgggtatccttccagagatcatttatgcatgtacacacatgtgtatgtgtgtctatataatttttctccttttctactcatgtgataccagacaagtgtattcaaggaacgctcctactaatgtgggaagagccatcccagaaatcagaatacaaaatgtgaacccagaattgggggatgtttttgcaatcacactcctgttgagtaagacatattttcattttattgcaacatactgaaattttagttttctgtacaaatcagaatctgcagtccctcccttaccccaaatgcccagctaatccaagagcacaaccagatttttctgattgactttctatctgcgacaggatgctcaagatcaggctctgtagctgacagcagtggcacaggcctctcccagctctgagcagcctctgcaggtgcctggacagctgctggcccctcccctaccttggccagttccaagtgaggaccagtggtgatgtgtggctgcaactgttgtggtcacttaggcaagctcttgtgtctttgatgcaggagtttgagcagcagcaactgaaggcttctattttgtggggcagacatcttagctactgagcaagtgcacagtgagtctcatgtggatatgcctgaatgtccagcgtcagttcatggagctactccctttccctcccaacttttcgttgttgttgagacagggtcttgttacccagactggagtgcagtggcaccattgtagctcactgcagcctcaacttcctggactcaagtgatcctcccgcctcagtctgtagctgcgtctacaggtgcacaccagcacacctggctaattttcgtaattatttttttgtagagacaggtctcaactcactatgttgcccaggctggcctcctcactctgtgcacacactttgaaaagaaaatgcttctggtc

SEQ ID NO: 10701 - protein, 148 aa, Homo sapiens; identical to SEQ ID NO: 1647

SEQ ID NO: 10702 - DNA, 2229 bp, Homo sapiens
acaaaaaaataattacgaaaattagccaggtgtgctggtgtgcacctgtagacgcagctacagactgaggcgggagggaaagggagtagctccatgaactgacgctggacattcaggcatatccacatgagactcactgtgcacttgctcagtagctaagatgtctgccccacaaaatagaagccttcagttgctgctgctcaaactcctgcatcaaagacacaagagcttgcctaagtgaccacaacagttgcagccacacatcaccactggtcctcacttggaactggccaaggtaggggaggggccagcagctgtccaggcacctgcagaggctgctcagagctgggagaggcctgtgccactgctgtcagctacagagcctgatcttgagcatcctgtcgcagatagaaagtcaatcagaaaaatctggttgtgctcttggattagctgggcatttggggtaagggagggactgcagattctgatttgtacagaaaactaaaatttcagtatgttgcaataaaatgaaaatatgtcttactcaacaggagtgtgattgcaaaaacatcccccaattctgggttcacattttgtattctgatttctgggatggctcttcccacattagtaggagcgttccttgaatacacttgtctggtatcacatgagtagaaaaggagaaaaattatatagacacacatacacatgtgtgtacatgcataaatgatctctggaaggatacccaaggaacaaaccaatagtaggtattcatggagtgaggagcggagcttgctaggcatcaggaactcaagaaaggcttttaactactttatgatttgtgaaccacatgaatggattacctattcaaaacattaagaaagaaatattcagcactgaacaaccaagtcagagttcactgtgggcaaaggcagagatgaccaaggaagaaaggggccaggtgaacctgggcctcagggaaagcccctacagctcaggaagctttttggctgaggttctgttcctatcaatcatgatggcagaggagcccatgtaacccagatgatgttatgtggtatcagcagcccccatgacaccaggcctgctgcctaccaggctctgggcaccagctaacccccacaagaggtgccagggacgttactacaatccctgggtggtagctaaggaagctaaggaagagactgagaggctaacctgcagaagggcctaaggctagtgagtgacaagaggtgattccatcactctctgcctggagctctgggtatactgccctggatgtatcaggatgtatttcataatgcccaaaaagcctctgagaaaaataattcctagttgttcaaagtagcttagagcgggatcaggccagggagatgacatgattttgaagtggggttgtgaaaaaggacaaggcccgaggctatttctctgatggatccaaggggcttggcactggggaaaaggatcttcttgtcaagaacagggtatccggcaatggtgggaggtcccctgtatccctcagctcagaccttcccaggggccacctgcccctatttggccatttctgtcctgccttccctggctaggcaagcataggcttcaaggaccttatctgccagggacaggcctaaccaaatcacacgtggcaaagaaaagcagcagatgtcaacttcctagtgtctgatactgacccaaccaggaatcaagtcaggctggttttgttccctgtttctgaaggcagttgaattcagttgtacccctagcaactactaatggttcagccacccgtggagtccagttggggctgagttatgctccactaacccatagcagaccagcaacattctatctttgagctgcttaagaaacacacaaaggataccagccagtggtccaagagcagaccagaatccccacgcagctacacagtaacaagtcccagcaactcctgaagatagatgcggaaagggtgactttaccatggggttcgagtctgagccaagagagttataaaggggtccctaactcattcctttttcaaaataaataaaaaaaggactgtctttcaaacaaaaaccctgcgattttaatgagaattaaaggaggatgtaaattaaaaggcctgtttgtctgtacagcaatgcagatgcgcaggcccatcctggtggaggacccagatgcagggagcaaatattcgggttgtgttgctaa

SEQ ID NO: 10703 - protein, 68 aa, Homo sapiens [sequence omitted]

SEQ ID NO: 10704 - DNA, 3354 bp, Homo sapiens
ggccgccgcccccgggctggggtttgggggaccgagccgctccgggttcgggatgctgaggagaccgcgggcccgcgccagcctcccacacacacacactctcccggcgcctcggccggccgggcgcggtgtgcaggggtgaggcggtgtctccaggctgaggagggacgcggaggagggtccggcgcggccccgggactggagggtgagtccctcacaaagggcggagcggggctgtcacctggagatcacggagggaagttcatccatgagctcggatttcccacattacaacttcaggatgcctaatattggattccagaatctgcctctcaacatatatattgtggtttttggtactgctatatttgtcttcatccttagtttactcttctgttgctacttgattaggctaagacatcaagcacacaaagaattttatgcctacaaacaggttatattaaaagagaaagtaaaagaattgaatttacatgagctctgtgcagtgtgcctagaagacttcaagcctcgagatgagttggggatttgcccatgtaagcacgccttccacagaaagtgccttattaagtggctggaggttcgtaaagtgtgtcccctgtgcaacatgccagttctacagctggcccagttgcacagtaagcaggaccgtggaccccctcaggggccccttcctggggcagagaacattgtatagcttaccgcaaggatcagactgttgctggacacgacgtctgtgtggagccaggaggaacacatgtggtgtctgtatggctgctctctacctaggacaccagctgccacttcttttgcctcatgaagaactcttgggccagccaaactgggaacctaggtgtctgggtcttgtgacaaccaaagcactttgacactaccccctgccgagagaagaggagtggatgagcctgcgggtttgcctcaagaaacttcatgagggtctcttactaactccattacactctctctcctggagcctcatctccatgtcaagcaggagggtaaagaagggaactaagagcaggtctttcaagccacacccccacctgcggatggatgggtttctctgtaggccatgcaggcctttgtcgcagcaaaccttcccagcagcccttgagccaagtaaaaccagcacaaccagccaccagtggttggtgaggcagtgcccacaaggctcatgttgtatgcctttgataaggccatcttggctttgagtagcagtgttcctcgtcacccatttccccctcaggattacaacacctgctatcaaatcatctaagctgaaaacatgagatgcgcttggaaaggcctagtcagaagccatttcctcttatcatttccctctcctatgcaccagtaaggcccgtccagagccccagcagggagtgggccctgagtccacactgtccctgagtgatccaggaggctgcccacatccccacatgtgcactgtggttccagtgtagctgctgtgagcccactgccactgcctcagaagggagccactgtgaacctctcgagtggctccaaagagcagtggctttttgagaatggcccatacttctggcccggctggatgaagggaatgccgaccctttggcctctccccctccttccatctcttctctctcttgccctatctctctttctacttcagaaaaaaaaaaaaaaaaaaaaaaaagcctgtcattcactttttaacactttatcccaaataagatccctgtgtaattctgaagctggtgatccacttggaattgtagatagtttcaggaagctcctgcagggctgtccaccgttggtgtgtgcctcagtatttggacttccgaaactgaaagtgaaagtgtctttataggagagaaacgcatgctgctctttggctctttctgtccaacttttctagaaatgactcaaagtccattaagatttgtgaatattgtataaattagctatggaaagtagcaggtcagatggaaaattcttttccacagccctgctctccgcctccctccatcttaggagcgcctgcctcaattcctcgtcaactgctttgctccactccatcccacaggtgtgagtgggggaagtttttcattaggaatacagtctgcgtgacatggagaatggatggagggagctttgctactctgctcttggcatgactccaggatttttttctggaatccaacctctgtcctcttaggagaaggaacctgtccttggttcagatggctgggcatgaggaggaaaatttccattagtgtagaacagtgctggacagaatccggtttggaaaattacaaatccagttggtcaaaataggccatttcctatgtgtgacctattcgtggtatgccaactggactgcttcctaaacaggacgaggaaagtgaggaatatttttatatgaaagccttagcctgtctggcacccatgaaaaaaactatttatgcactcctactttcaccgtctttttgcattctctatttgtagcacaacagagttgaatgccacaaaacaccccgtttatagtgagctgttttcagtgaccaatatcagaaggaggcttgcttctggactagcctcactaattgccagcagccaccattttccatggaatggccttgggacagatgtcacctctgttatggggctctaataggaaagagaatgttttttcccttcctatgatcaatactgcaaattattgctgctcacagcttttataggattctcccaactgaaagttgcaggctttttctgtccctgtgcatcagtactaacaaaagacagcctcaccaagtctgtatatttgaacagaggcaagttaattcatccccccgtgtcagagccacaggcatgttgagggggttgatacgtagcactggaccagggcgcaaagcccagatagttccagccatgagaggagagcacaagaatgctctgcactctgcactcagcaccaccttgggtctgctttgcccagatgagggaccactaacaaccttctcagcacatgtgaatgtggactggttttaaaatgcattcattctgctaggattgggctggaagctggaacagtgagagtactttttctgctcctagtcatctccctttctcagcgtgacatcctcctgcagcaagcctagtatcactagcagtagttcctgcgactcttagcaacacaacccgaatatttgctccctgcatctgggtcctccaccaggatgggcctgcgcatctgcattgctgtacagacaaacaggccttttaatttacatcctcctttaattctcattaaaatcgcagggtttttgtttg

SEQ ID NO: 10705 - protein, 148 aa, Homo sapiens; identical to SEQ ID NO: 1647

SEQ ID NO: 10706 - DNA, 3271 bp, Homo sapiens
gccacctccgccgcgctctgtccggacggacgctcgccgcccgcagcctgccgcccgccgcagggcgctgacggtcccgcacgtctgccgctgccaccggcgcgcccgaaacttccagcactatgttgaataagagtggtgagagcagatatcctgccttgttcccggtcttagggggttcatccatgagctcggatttcccacattacaacttcaggatgcctaatattggattccagaatctgcctctcaacatatatattgtggtttttggtactgctatatttgtcttcatccttagtttactcttctgttgctacttgattaggctaagacatcaagcacacaaagaattttatgcctacaaacaggttatattaaaagagaaagtaaaagaattgaatttacatgagctctgtgcagtgtgcctagaagacttcaagcctcgagatgagttggggatttgcccatgtaagcacgccttccacagaaagtgccttattaagtggctggaggttcgtaaagtgtgtcccctgtgcaacatgccagttctacagctggcccagttgcacagtaagcaggaccgtggaccccctcaggggccccttcctggggcagagaacattgtatagcttaccgcaaggatcagactgttgctggacacgacgtctgtgtggagccaggaggaacacatgtggtgtctgtatggctgctctctacctaggacaccagctgccacttcttttgcctcatgaagaactcttgggccagccaaactgggaacctaggtgtctgggtcttgtgacaaccaaagcactttgacactaccccctgccgagagaagaggagtggatgagcctgcgggtttgcctcaagaaacttcatgagggtctcttactaactccattacactctctctcctggagcctcatctccatgtcaagcaggagggtaaagaagggaactaagagcaggtctttcaagccacacccccacctgcggatggatgggtttctctgtaggccatgcaggcctttgtcgcagcaaaccttcccagcagcccttgagccaagtaaaaccagcacaaccagccaccagtggttggtgaggcagtgcccacaaggctcatgttgtatgcctttgataaggccatcttggctttgagtagcagtgttcctcgtcacccatttccccctcaggattacaacacctgctatcaaatcatctaagctgaaaacatgagatgcgcttggaaaggcctagtcagaagccatttcctcttatcatttccctctcctatgcaccagtaaggcccgtccagagccccagcagggagtgggccctgagtccacactgtccctgagtgatccaggaggctgcccacatccccacatgtgcactgtggttccagtgtagctgctgtgagcccactgccactgcctcagaagggagccactgtgaacctctcgagtggctccaaagagcagtggctttttgagaatggcccatacttctggcccggctggatgaagggaatgccgaccctttggcctctccccctccttccatctcttctctctcttgccctatctctctttctacttcagaaaaaaaaaaaaaaaaaaaaaaaagcctgtcattcactttttaacactttatcccaaataagatccctgtgtaattctgaagctggtgatccacttggaattgtagatagtttcaggaagctcctgcagggctgtccaccgttggtgtgtgcctcagtatttggacttccgaaactgaaagtgaaagtgtctttataggagagaaacgcatgctgctctttggctctttctgtccaacttttctagaaatgactcaaagtccattaagatttgtgaatattgtataaattagctatggaaagtagcaggtcagatggaaaattcttttccacagccctgctctccgcctccctccatcttaggagcgcctgcctcaattcctcgtcaactgctttgctccactccatcccacaggtgtgagtgggggaagtttttcattaggaatacagtctgcgtgacatggagaatggatggagggagctttgctactctgctcttggcatgactccaggatttttttctggaatccaacctctgtcctcttaggagaaggaacctgtccttggttcagatggctgggcatgaggaggaaaatttccattagtgtagaacagtgctggacagaatccggtttggaaaattacaaatccagttggtcaaaataggccatttcctatgtgtgacctattcgtggtatgccaactggactgcttcctaaacaggacgaggaaagtgaggaatatttttatatgaaagccttagcctgtctggcacccatgaaaaaaactatttatgcactcctactttcaccgtctttttgcattctctatttgtagcacaacagagttgaatgccacaaaacaccccgtttatagtgagctgttttcagtgaccaatatcagaaggaggcttgcttctggactagcctcactaattgccagcagccaccattttccatggaatggccttgggacagatgtcacctctgttatggggctctaataggaaagagaatgttttttcccttcctatgatcaatactgcaaattattgctgctcacagcttttataggattctcccaactgaaagttgcaggctttttctgtccctgtgcatcagtactaacaaaagacagcctcaccaagtctgtatatttgaacagaggcaagttaattcatccccccgtgtcagagccacaggcatgttgagggggttgatacgtagcactggaccagggcgcaaagcccagatagttccagccatgagaggagagcacaagaatgctctgcactctgcactcagcaccaccttgggtctgctttgcccagatgagggaccactaacaaccttctcagcacatgtgaatgtggactggttttaaaatgcattcattctgctaggattgggctggaagctggaacagtgagagtactttttctgctcctagtcatctccctttctcagcgtgacatcctcctgcagcaagcctagtatcactagcagtagttcctgcgactcttagcaacacaacccgaatatttgctccctgcatctgggtcctccaccaggatgggcctgcgcatctgcattgctgtacagacaaacaggccttttaatttacatcctcctttaattctcattaaaatcgcagggtttttgtttg

SEQ ID NO: 10707 - protein, 169 aa, Homo sapiens; identical to SEQ ID NO: 10699

SEQ ID NO: 10708 - DNA, 3239 bp, Homo sapiens
gcccctcgcgaggggccgccgggcgcagtcagccgccgccacctccgccgcgctctgtccggacggacgctcgccgcccgcagcctgccgcccgccgcagggcgctgacggtcccgcacgtctgccgctgccaccggcgcgcccgattcatccatgagctcggatttcccacattacaacttcaggatgcctaatattggattccagaatctgcctctcaacatatatattgtggtttttggtactgctatatttgtcttcatccttagtttactcttctgttgctacttgattaggctaagacatcaagcacacaaagaattttatgcctacaaacaggttatattaaaagagaaagtaaaagaattgaatttacatgagctctgtgcagtgtgcctagaagacttcaagcctcgagatgagttggggatttgcccatgtaagcacgccttccacagaaagtgccttattaagtggctggaggttcgtaaagtgtgtcccctgtgcaacatgccagttctacagctggcccagttgcacagtaagcaggaccgtggaccccctcaggggccccttcctggggcagagaacattgtatagcttaccgcaaggatcagactgttgctggacacgacgtctgtgtggagccaggaggaacacatgtggtgtctgtatggctgctctctacctaggacaccagctgccacttcttttgcctcatgaagaactcttgggccagccaaactgggaacctaggtgtctgggtcttgtgacaaccaaagcactttgacactaccccctgccgagagaagaggagtggatgagcctgcgggtttgcctcaagaaacttcatgagggtctcttactaactccattacactctctctcctggagcctcatctccatgtcaagcaggagggtaaagaagggaactaagagcaggtctttcaagccacacccccacctgcggatggatgggtttctctgtaggccatgcaggcctttgtcgcagcaaaccttcccagcagcccttgagccaagtaaaaccagcacaaccagccaccagtggttggtgaggcagtgcccacaaggctcatgttgtatgcctttgataaggccatcttggctttgagtagcagtgttcctcgtcacccatttccccctcaggattacaacacctgctatcaaatcatctaagctgaaaacatgagatgcgcttggaaaggcctagtcagaagccatttcctcttatcatttccctctcctatgcaccagtaaggcccgtccagagccccagcagggagtgggccctgagtccacactgtccctgagtgatccaggaggctgcccacatccccacatgtgcactgtggttccagtgtagctgctgtgagcccactgccactgcctcagaagggagccactgtgaacctctcgagtggctccaaagagcagtggctttttgagaatggcccatacttctggcccggctggatgaagggaatgccgaccctttggcctctccccctccttccatctcttctctctcttgccctatctctctttctacttcagaaaaaaaaaaaaaaaaaaaaaaaagcctgtcattcactttttaacactttatcccaaataagatccctgtgtaattctgaagctggtgatccacttggaattgtagatagtttcaggaagctcctgcagggctgtccaccgttggtgtgtgcctcagtatttggacttccgaaactgaaagtgaaagtgtctttataggagagaaacgcatgctgctctttggctctttctgtccaacttttctagaaatgactcaaagtccattaagatttgtgaatattgtataaattagctatggaaagtagcaggtcagatggaaaattcttttccacagccctgctctccgcctccctccatcttaggagcgcctgcctcaattcctcgtcaactgctttgctccactccatcccacaggtgtgagtgggggaagtttttcattaggaatacagtctgcgtgacatggagaatggatggagggagctttgctactctgctcttggcatgactccaggatttttttctggaatccaacctctgtcctcttaggagaaggaacctgtccttggttcagatggctgggcatgaggaggaaaatttccattagtgtagaacagtgctggacagaatccggtttggaaaattacaaatccagttggtcaaaataggccatttcctatgtgtgacctattcgtggtatgccaactggactgcttcctaaacaggacgaggaaagtgaggaatatttttatatgaaagccttagcctgtctggcacccatgaaaaaaactatttatgcactcctactttcaccgtctttttgcattctctatttgtagcacaacagagttgaatgccacaaaacaccccgtttatagtgagctgttttcagtgaccaatatcagaaggaggcttgcttctggactagcctcactaattgccagcagccaccattttccatggaatggccttgggacagatgtcacctctgttatggggctctaataggaaagagaatgttttttcccttcctatgatcaatactgcaaattattgctgctcacagcttttataggattctcccaactgaaagttgcaggctttttctgtccctgtgcatcagtactaacaaaagacagcctcaccaagtctgtatatttgaacagaggcaagttaattcatccccccgtgtcagagccacaggcatgttgagggggttgatacgtagcactggaccagggcgcaaagcccagatagttccagccatgagaggagagcacaagaatgctctgcactctgcactcagcaccaccttgggtctgctttgcccagatgagggaccactaacaaccttctcagcacatgtgaatgtggactggttttaaaatgcattcattctgctaggattgggctggaagctggaacagtgagagtactttttctgctcctagtcatctccctttctcagcgtgacatcctcctgcagcaagcctagtatcactagcagtagttcctgcgactcttagcaacacaacccgaatatttgctccctgcatctgggtcctccaccaggatgggcctgcgcatctgcattgctgtacagacaaacaggccttttaatttacatcctcctttaattctcattaaaatcgcagggtttttgtttg

SEQ ID NO: 10709 - protein, 148 aa, Homo sapiens; identical to SEQ ID NO: 1647

SEQ ID NO: 10710 - DNA, 1575 bp, Homo sapiens
gcccctcgcgaggggccgccgggcgcagtcagccgccgccacctccgccgcgctctgtccggacggacgctcgccgcccgcagcctgccgcccgccgcagggcgctgacggtcccgcacgtctgccgctgccaccggcgcgcccgattcatccatgagctcggatttcccacattacaacttcaggatgcctaatattggattccagaatctgcctctcaacatatatattgtggtttttggtactgctatatttgtcttcatccttagtttactcttctgttgctacttgattaggctaagacatcaagcacacaaagaattttatgcctacaaacaggttatattaaaagagaaagtaaaagaattgaatttacatgagctctgtgcagtgtgcctagaagacttcaagcctcgagatgagttggggatttgcccatgtaagcacgccttccacagaaagtgccttattaagtggctggaggttcgtaaagtgtgtcccctgtgcaacatgccagttctacagctggcccagttgcacagtaagcaggaccgtggaccccctcaggggccccttcctggggcagagaacattgtatagcttaccgcaaggatcagactgttgctggacacgacgtctgtgtggagccaggaggaacacatgtggtgtctgtatggctgctctctacctaggacaccagctgccacttcttttgcctcatgaagaactcttgggccagccaaactgggaacctaggtgtctgggtcttgtgacaaccaaagcactttgacactaccccctgccgagagaagaggagtggatgagcctgcgggtttgcctcaagaaacttcatgagggtctcttactaactccattacactctctctcctggagcctcatctccatgtcaagcaggagggtaaagaagggaactaagagcaggtctttcaagccacacccccacctgcggatggatgggtttctctgtaggccatgcaggcctttgtcgcagcaaaccttcccagcagcccttgagccaagtaaaaccagcacaaccagccaccagtggttggtgaggcagtgcccacaaggctcatgttgtatgcctttgataaggccatcttggctttgagtagcagtgttcctcgtcacccatttccccctcaggattacaacacctgctatcaaatcatctaagctgaaaacatgagatgcgcttggaaaggcctagtcagaagccatttcctcttatcatttccctctcctatgcaccagtaaggcccgtccagagccccagcagggagtgggccctgagtccacactgtccctgagtgatccaggaggctgcccacatccccacatgtgcactgtggttccagtgtagctgctgtgagcccactgccactgcctcagaagggagccactgtgaacctctcgagtggctccaaagagcagtggctttttgagaatggcccatacttctggcccggctggatgaagggaatgccgaccctttggcctctccccctccttccatctcttctctctcttgccctatctctctttctacttcag

SEQ ID NO: 10711 - protein, 148 aa, Homo sapiens; identical to SEQ ID NO: 1647

SEQ ID NO: 10712 - DNA, 607 bp, Homo sapiens
tgaggtcaggagttcaagaccagcctggccaacaagtgaaacaccatctctactaaaaatacaaaaattagttgggtgtggtggcacacgcctgtacctcccgagtagctgggactacaggcgcacgccaccacgcccagctaaattttgtatttttagtagagatggggtttcaccatgttggccaggatgttctagatctcttgatcttgtgatccgcctgcctcagcctcccaaagtgctgggattacaggcatgagccaccgcgcctggccaatttttaaaatttaatcatgaggtaaggagctttcctttgtgatgatcctaatttgttacctttaacacttcaaatggtaaattgggatttaacaagtctttgcagttaatctagagatctgtggagtcagctcctccagaattaccctagctcattttttatgataacctaagctctccagcaccttcccaggaggttcttctgttctccagagagctccctccagtcaccaccactggactcatcagaaccataggaagactataacttaggtctaaacaagacagtcactaccaaccacagtcttacacaggattgtagtatagaatg

SEQ ID NO: 10713 - protein, 85 aa, Homo sapiens
EVRSSRPAWPTSETPSLLKIQKLVGCGGTRLYLPSSWDYRRTPPRPAKFCIFSRDGVSPCWPGCSRSLDLVIRLPQPPKVLGLQA

SEQ ID NO: 10714 - DNA, 686 bp, Homo sapiens
gacttctgaatgcggactggaggagatgaggatggagggctgggaggatagtaagagagggagcagggagaccagttacgggccactgaagtagtcaaggtgtcagacaagagctttgagacaagaggactcgtcttagagatagattgcatgagggccatgagggtaagggaggtgtccaagctgacctcagccttctggcttgtccactggttggatggggtcaccattttattgtaatggcggatactggttgcagagaactgagtgttggaggaccatgaatgagttccatttcagatctgctcagcttgctgtccctgggagacaaccacaggagttgtttaggagacaccgggctacttcagcctggagctccaggaggaggtctgcattggtcgttgggacaataggaccaggacatggcaggctgcaggaccccagttgcaccaaactgccatcccctcctgcctggtttcccttcttcatgaaccgatcaatgggccatagccaggttgggatgcatgtcttccacaggatgggaactacctccagctgatcagttaacagttcagttggggacctttgagtaaaatagatgaccctctattaggtggttgggcctcttccaatcagttgacagcctacagagaacaaagactgatctccccccagcaagaaggaat

SEQ ID NO: 10715 - protein, 113 aa, Homo sapiens
MGSPFYCNGGYWLQRTECWRTMNEFHFRSAQLAVPGRQPQELFRRHRATSAWSSRRRSALVVGTIGPGHGRLQDPSCTKLPSPPAWFPFFMNRSMGHSQVGMHVFHRMGTTSS

SEQ ID NO: 10716 - DNA, 605 bp, Homo sapiens
attgcttccgcgttccggttgcggatggtgagtgtgtcggggggcttggcggcttttctcctcagttttctggagtgctttggaggagaggactatggcagccagggacgccacttcaggcagcctgtcagaggagagcagtgctttggacctgccatcagcgtgtgacataagagattacgtcctgcagggacccagccaagaagccaacagcgaggctttcagttctttggaattccattcttttccttattcttctgatgtggatccagacaccagtaacttaaatatagaacaaaataactcctggaccgctgagaacttctggcttgaccctgctgtgaaaggccagtcagagaaggaagaggatgatggccttcggaaatccctggatagattctatgaaatgtttggtcatccacagccaggctctgcaaactcactctctgcatctgtctgcaagtgcctgtctcagaaaatcactcaactaagaggccaggagagccaaaagtatttcctcttgcagcagaatgtaatgaaagacctgtaactggtgccgggcagtgtgcagggtagtaatggaggtgctgtgccatgaccagcag

SEQ ID NO: 10717 - protein, 151 aa, Homo sapiens
MAARDATSGSLSEESSALDLPSACDIRDYVLQGPSQEANSEAFSSLEFHSFPYSSDVDPDTSNLNIEQNNSWTAENFWLDPAVKGQSEKEEDDGLRKSLDRFYEMFGHPQPGSANSLSASVCKCLSQKITQLRGQESQKYFLLQQNVMKDL

SEQ ID NO: 10718 - DNA, 1153 bp, Homo sapiens
tccgcgttccggttgcggatggtgagtgtgtcggggggcttggcggcttttctcctcagttttctggagtgctttggaggagaggactatggcagccagggacgccacttcaggcagcctgtcagaggagagcagtgctttggacctgccatcagcgtgtgacataagagattacgtcctgcagggacccagccaagaagccaacagcgaggctttcagttctttggaattccattcttttccttattcttctgatgtggatccagacaccagtaacttaaatatagaacaaaataactcctggaccgctgagaacttctggcttgaccctgctgtgaaaggccagtcagagaaggaagaggatgatggccttcggaaatccctggatagattctatgaaatgtttggtcatccacagccaggctctgcaaactcactctctgcatctgtctgcaagtgcctgtctcagaaaatcactcaactaagaggccaggagagccaaaagtatgccctccgcagttttcaaatggcccgggtgatcttcaaccgggacggctgctccgtcttacagaggcattccagggacacccacttctacccactggaggaaggaagtacatctttggatgatgaaaagccaaacccaggactgtcaaaggatattactcatttcctcttgcagcagaatgtaatgaaagacctgtaactggtgccgggcagtgtgcagggtagtaatggaggtgctgtgccatgaccagcagtgttggtggccacccagatcccctagggtctctggccagctctgtgtgcccaatcccaattaagtgctttgaggttaaaggctggcacctgtgacctggtattggagccagtcagcccatatggagagccagcagggtctgggagttctccgtcctcttggccaaggccgctgactgactgggctacgagtcaaaagcccagctcccttgcctcaaggaaggacattctctgaggagtaatttatgctctagcactccctttcctctagatcggcctgaggctgggacattacatgaaatcacacccttgctgggcttaatccctttccctaccctcccatttatttactggtgtctctgggagcctttccttaataaacctcttatatctg

SEQ ID NO: 10719 - protein, 205 aa, Homo sapiens; identical to SEQ ID NO: 1649

SEQ ID NO: 10720 - DNA, 612 bp, Homo sapiens
ggtgagtgtgtcggggggcttggcggcttttctcctcagttttctggagtgctttggaggagaggactatggcagccagggacgccacttcaggcagcctgtcagaggagagcagtgctttggacctgccatcagcgtgtgacataagagattacgtcctgcagggacccagccaagaagccaacagcgaggctttcagttctttggaattccattcttttccttattcttctgatgtggatccaggcgtgagccactgcatccagcctaaactcactagggagattttttgaatagcctgtactctgtagctagtttagcttgctaccaaggtttagcctttctgggtctgtactgaatatcccaggtattcaacagtcatctcactctggctgtcagaacatgcatgtctcccagccctgtgtgagttctggaagttgttcagctcacagctcccctggctgtgcctggcattatgacttagtgttcactgtgaaatactcaaaagaatccctatgctgatttctggagctctttatctgtttagctccctcatctccaggactcagcttcagaaattccaggcacctgaaactgatctctgtctctttg

SEQ ID NO: 10721 - protein, 74 aa, Homo sapiens
MAARDATSGSLSEESSALDLPSACDIRDYVLQGPSQEANSEAFSSLEFHSFPYSSDVDPGVSHCIQPKLTREIF

SEQ ID NO: 10722 - DNA, 1203 bp, Homo sapiens
ggcggcttttctcctcagttttctggagtgctttggaggagagacaaggtcttgctatgttgcccaggctggtcttgaactcctggcctcaagcgatcctcccaacttggcctcgcaaagtgctgggactacaggactatggcagccagggacgccacttcaggcagcctgtcagaggagagcagtgctttggacctgccatcagcgtgtgacataagagattacgtcctgcagggacccagccaagaagccaacagcgaggctttcagttctttggaattccattcttttccttattcttctgatgtggatccagacaccagtaacttaaatatagaacaaaataactcctggaccgctgagaacttctggcttgaccctgctgtgaaaggccagtcagagaaggaagaggatgatggccttcggaaatccctggatagattctatgaaatgtttggtcatccacagccaggctctgcaaactcactctctgcatctgtctgcaagtgcctgtctcagaaaatcactcaactaagaggccaggagagccaaaagtatgccctccgcagttttcaaatggcccgggtgatcttcaaccgggacggctgctccgtcttacagaggcattccagggacacccacttctacccactggaggaaggaagtacatctttggatgatgaaaagccaaacccaggactgtcaaaggatattactcatttcctcttgcagcagaatgtaatgaaagacctgtaactggtgccgggcagtgtgcagggtagtaatggaggtgctgtgccatgaccagcagtgttggtggccacccagatcccctagggtctctggccagctctgtgtgcccaatcccaattaagtgctttgaggttaaaggctggcacctgtgacctggtattggagccagtcagcccatatggagagccagcagggtctgggagttctccgtcctcttggccaaggccgctgactgactgggctacgagtcaaaagcccagctcccttgcctcaaggaaggacattctctgaggagtaatttatgctctagcactccctttcctctagatcggcctgaggctgggacattacatgaaatcacacccttgctgggcttaatccctttccctaccctcccatttatttactggtgtctctgggagcctttccttaataaacctcttatatctg

SEQ ID NO: 10723 - protein, 205 aa, Homo sapiens; identical to SEQ ID NO: 1649

SEQ ID NO: 10724 - DNA, 1233 bp, Homo sapiens
agttttctggagtgctttggaggagagatggagtctcactcttgtagcccaagctggagtacaatgacaatctcagctcactgcaacctccgtcttccatcagcttcccaaagtgttgggattacaggcgtaagccaccacatctggcctaggattttctatatgactatggcagccagggacgccacttcaggcagcctgtcagaggagagcagtgctttggacctgccatcagcgtgtgacataagagattacgtcctgcagggacccagccaagaagccaacagcgaggctttcagttctttggaattccattcttttccttattcttctgatgtggatccagacaccagtaacttaaatatagaacaaaataactcctggaccgctgagaacttctggcttgaccctgctgtgaaaggccagtcagagaaggaagaggatgatggccttcggaaatccctggatagattctatgaaatgtttggtcatccacagccaggctctgcaaactcactctctgcatctgtctgcaagtgcctgtctcagaaaatcactcaactaagaggccaggagagccaaaagtatgccctccgcagttttcaaatggcccgggtgatcttcaaccgggacggctgctccgtcttacagaggcattccagggacacccacttctacccactggaggaaggaagtacatctttggatgatgaaaagccaaacccaggactgtcaaaggatattactcatttcctcttgcagcagaatgtaatgaaagacctgtaactggtgccgggcagtgtgcagggtagtaatggaggtgctgtgccatgaccagcagtgttggtggccacccagatcccctagggtctctggccagctctgtgtgcccaatcccaattaagtgctttgaggttaaaggctggcacctgtgacctggtattggagccagtcagcccatatggagagccagcagggtctgggagttctccgtcctcttggccaaggccgctgactgactgggctacgagtcaaaagcccagctcccttgcctcaaggaaggacattctctgaggagtaatttatgctctagcactccctttcctctagatcggcctgaggctgggacattacatgaaatcacacccttgctgggcttaatccctttccctaccctcccatttatttactggtgtctctgggagcctttccttaataaacctcttatatctg

SEQ ID NO: 10725 - protein, 252 aa, Homo sapiens
MESHSCSPSWSTMTISAHCNLRLPSASQSVGITGVSHHIWPRIFYMTMAARDATSGSLSEESSALDLPSACDIRDYVLQGPSQEANSEAFSSLEFHSFPYSSDVDPDTSNLNIEQNNSWTAENFWLDPAVKGQSEKEEDDGLRKSLDRFYEMFGHPQPGSANSLSASVCKCLSQKITQLRGQESQKYALRSFQMARVIFNRDGCSVLQRHSRDTHFYPLEEGSTSLDDEKPNPGLSKDITHFLLQQNVMKDL

SEQ ID NO: 10726 - DNA, 1057 bp, Homo sapiens
aattttgatagaagtggaacagaggcctgcagtgttgtcccaggagctgttgagggcagtggcgcctgcttctggccatggacagagagattcagcatcaccatgtcattgcagaatgaagggagagttggctttgttaaccaccttggctgcccgtgatgcactgatcaacaccagtaacttaaatatagaacaaaataactcctggaccgctgagaacttctggcttgaccctgctgtgaaaggccagtcagagaaggaagaggatgatggccttcggaaatccctggatagattctatgaaatgtttggtcatccacagccaggctctgcaaactcactctctgcatctgtctgcaagtgcctgtctcagaaaatcactcaactaagaggccaggagagccaaaagtatgccctccgcagttttcaaatggcccgggtgatcttcaaccgggacggctgctccgtcttacagaggcattccagggacacccacttctacccactggaggaaggaagtacatctttggatgatgaaaagccaaacccaggactgtcaaaggatattactcatttcctcttgcagcagaatgtaatgaaagacctgtaactggtgccgggcagtgtgcagggtagtaatggaggtgctgtgccatgaccagcagtgttggtggccacccagatcccctagggtctctggccagctctgtgtgcccaatcccaattaagtgctttgaggttaaaggctggcacctgtgacctggtattggagccagtcagcccatatggagagccagcagggtctgggagttctccgtcctcttggccaaggccgctgactgactgggctacgagtcaaaagcccagctcccttgcctcaaggaaggacattctctgaggagtaatttatgctctagcactccctttcctctagatcggcctgaggctgggacattacatgaaatcacacccttgctgggcttaatccctttccctaccctcccatttatttactggtgtctctgggagcctttccttaataaacctcttatatctg

SEQ ID NO: 10727 - protein, 164 aa, Homo sapiens
MKGELALLTTLAARDALINTSNLNIEQNNSWTAENFWLDPAVKGQSEKEEDDGLRKSLDRFYEMFGHPQPGSANSLSASVCKCLSQKITQLRGQESQKYALRSFQMARVIFNRDGCSVLQRHSRDTHFYPLEEGSTSLDDEKPNPGLSKDITHFLLQQNVMKDL

SEQ ID NO: 10728 - DNA, 971 bp, Homo sapiens
ggtgggtgcttcgtgctggcttatgagaaaaggaacaccacagcagtgcagaccattgaaaatgacagtgatccaaggttaaagacaccagtaacttaaatatagaacaaaataactcctggaccgctgagaacttctggcttgaccctgctgtgaaaggccagtcagagaaggaagaggatgatggccttcggaaatccctggatagattctatgaaatgtttggtcatccacagccaggctctgcaaactcactctctgcatctgtctgcaagtgcctgtctcagaaaatcactcaactaagaggccaggagagccaaaagtatgccctccgcagttttcaaatggcccgggtgatcttcaaccgggacggctgctccgtcttacagaggcattccagggacacccacttctacccactggaggaaggaagtacatctttggatgatgaaaagccaaacccaggactgtcaaaggatattactcatttcctcttgcagcagaatgtaatgaaagacctgtaactggtgccgggcagtgtgcagggtagtaatggaggtgctgtgccatgaccagcagtgttggtggccacccagatcccctagggtctctggccagctctgtgtgcccaatcccaattaagtgctttgaggttaaaggctggcacctgtgacctggtattggagccagtcagcccatatggagagccagcagggtctgggagttctccgtcctcttggccaaggccgctgactgactgggctacgagtcaaaagcccagctcccttgcctcaaggaaggacattctctgaggagtaatttatgctctagcactccctttcctctagatcggcctgaggctgggacattacatgaaatcacacccttgctgggcttaatccctttccctaccctcccatttatttactggtgtctctgggagcctttccttaataaacctcttatatctg

SEQ ID NO: 10729 - protein, 101 aa, Homo sapiens
MFGHPQPGSANSLSASVCKCLSQKITQLRGQESQKYALRSFQMARVIFNRDGCSVLQRHSRDTHFYPLEEGSTSLDDEKPNPGLSKDITHFLLQQNVMKDL

SEQ ID NO: 10730 - DNA, 4656 bp, Homo sapiens
cagtagtagttccccagcgtgcgcccggggagaccgggaacatggcgctgggagcgctgtagcagctgagaaggggctgaggcaccgccgcttcgctgacagccggccaccaggtttctgtctcccagtataatcatatccagccccatggctcttactggggcctctgaaatgtttatcaccaaatctgtgtctgcagttccaacctcttccctgagcatcaaagctgtatttccaactttcgctggatgcttctatctggaaatacactgtggtgaaatgcttccacctcttgctaaaatgaacactgaggaaaaatgaagaagactgacaagcaccagcgaaaagttgcagaatagaaatagccacactcctctggagtctttaattcatccacagccatcatataaaggttttggcatcatgtttgggaagaaaaagaaaaagattgaaatatctggcccgtccaactttgaacacagggttcatactgggtttgatccacaagagcagaagtttaccggccttccccagcagtggcacagcctgttagcagatacggccaacaggccaaagcctatggtggacccttcatgcatcacacccatccagctggctcctatgaagacaatcgttagaggaaacaaaccctgcaaggaaacctccatcaacggcctgctagaggattttgacaacatctcggtgactcgctccaactccctaaggaaagaaagcccacccaccccagatcagggagcctccagccacggtccaggccacgcggaagaaaatggcttcatcaccttctcccagtattccagcgaatccgatactactgctgactacacgaccgaaaagtacagggagaagagtctctatggagatgatctggatccgtattatagaggcagccacgcagccaagcaaaatgggcacgtaatgaaaatgaagcacggggaggcctactattctgaggtgaagcctttgaaatccgattttgccagattttctgccgattatcactcacatttggactcactgagcaaaccaagtgaatacagtgacctcaagtgggagtatcagagagcctcgagtagctcccctctggattattcattccaattcacaccttctagaactgcagggaccagcgggtgctccaaggagagcctggcgtacagtgaaagtgaatggggacccagcctggatgactatgacaggaggccaaagtcttcgtacctgaatcagacaagccctcagcccaccatgcggcagaggtccaggtcaggctcgggactccaggaaccgatgatgccatttggagcaagtgcatttaaaacccatccccaaggacactcctacaactcctacacctaccctcgcttgtccgagcccacaatgtgcattccaaaggtggattacgatcgagcacagatggtcctcagccctccactgtcagggtctgacacctaccccaggggccctgccaaactacctcaaagtcaaagcaaatcgggctattcctcaagcagtcaccagtacccgtctgggtaccacaaagccaccttgtaccatcacccctccctgcagagcagttcgcagtacatctccacggcttcctacctgagctccctcagcctctcatccagcacctacccgccgcccagctggggctcctcctccgaccagcagccctccagggtgtcccatgaacagtttcgggcggccctgcagctggtggtcagcccaggagaccccagggaatacttggccaactttatcaaaatcggggaaggctcaaccggcatcgtatgcatcgccaccgagaaacacacagggaaacaagttgcagtgaagaaaatggacctccggaagcaacagagacgagaactgcttttcaatgaggtcgtgatcatgcgggattaccaccatgacaatgtggttgacatgtacagcagctaccttgtcggcgatgagctctgggtggtcatggagtttctagaaggtggtgccttgacagacattgtgactcacaccagaatgaatgaagaacagatagctactgtctgcctgtcagttctgagagctctctcctaccttcataaccaaggagtgattcacagggacataaaaagtgactccatcctcctgacaagcgatggccggataaagttgtctgattttggtttctgtgctcaagtttccaaagaggtgccgaagaggaaatcattggttggcactccctactggatggcccctgaggtgatttctaggctaccttatgggacagaggtggacatctggtccctcgggatcatggtgatagaaatgattgatggcgagcccccctacttcaatgagcctcccctccaggcgatgcggaggatccgggacagtttacctccaagagtgaaggacctacacaaggtttcttcagtgctccggggattcctagacttgatgttggtgagggagccctctcagagagcaacagcccaggaactcctcggacatccattcttaaaactagcaggtccaccgtcttgcatcgtccccctcatgagacaatacaggcatcactgagcagaggattcgtgtaggtggcaaagctagatgaggacatgagaataattcaggagaacaaaaggaaacacagaacatgcaaaaggcctgtgcattctagaccagccaattggtgggacagcgtgatgaccggcagggttcaacagaccagggcatcttcttgtgtcttaaacaggcatctctccactgacagccggtgtggtcacttggagcacggctttaataagtcattattatatttttcagcccttcatccagcaaatcagaaggactcagtacaaactccgttatgatatatcctagccacatgcagggtaacatgtaggattttctatattgaaagaatacttttctggcaaaaaaaaaaaaaaaagaaagaaaggaaaacaaaaagcacttttttcttaatggtagcagtataatgtattttgcaacgaatttgtaatttttctgtacgatagttttgataatttatagtactttgatgtcatgtagccattgtatcagttgaagtaatacttgtttactagaggagtttgaacaaagcctttcctacttttttatccctttaagagaaccaatgattctttaggaactttgaatactgaatgactctcaatcaccgtcagctttagtaaaatctctttcttatcctaacaagtgtcttatttggtggaagaagaattaagagtgatggtgatggtgtgcacgtttcattaatccaaccaaaaataatgaaataaaatttgagccacagtataccactccttgggataaagttaaatatttttaaagatcacattttccatgaacgcctctagtagcaaaccattcttttgcacaccacaatgtttccctcagtgccctttctcaaatgggtacaatgttcccttgtggccaaatttccctcccagggagcaatttcagtgctaggatcattggattcagttcccaaaatagaatgtttcagtgagaccatgagaattccaggctcacaaagggagaggagagaacagggcaagacgtttggtttcatttgtcaccatttttaaaactctgtatgctagcacaccaaactcttgtctatatttacctttgtaccacagtattaatcgctattgttcatgtatcgtgctggaagtctgaactgactctagaggatgaattagcaagagggtattttaccaggtatgatctgacttcagttgtgcccatgttataatgtgtttccgacataggagagtcgtgctgctgtctagatcttcttgaatgttgataaaaatgaatgactactacaatacattttgtgttgcttgttggatgaatttgcatgttaactgtaggccaatatagatttgcctttaaaactctggaagagctacatagtcatcattagtttctattaattatgcatcagacaaaagccatttgttaccaaactgggaaaacagaggcttttcttaactatttcacatactgtaacaaatatgaatttaaatttgtgatagcgctctggttgctctaagcataattaagaatttttgtaattaataggttgctaattatttatcactgctaaaaaggaaaaaaggcataaaatgaccttctactgattagattttcagttttctttcaaactggaaatgcctccataaatatgatctatgattttgcttcataaaacagcaaatcaatgttttatgtaaaatattaaagcattaatataaatatgtgagaataaaaacaatctaaatccagaaaatggcagtcctaaatgttcatgagacagattgtattaatttaaccaggactatgtagaagtagaaagaaaagaaaaagaaaatcttttttaaaccagaataaacattaaaaactattgcagaaaatagtggattttggattccaaacattttcgacagtgtaatggaaatttttctgtaattttcttaccatcgggtattttttaaagtattcattgagtttaccaaaagttactgtagcttaaaaggttttgtgagcactaactattggcagaaactgcatttgcaaataaaaataaatgtttgccttttc

SEQ ID NO: 10731 - protein, 719 aa, Homo sapiens; identical to SEQ ID NO: 1651

SEQ ID NO: 10732 - DNA, 4527 bp, Homo sapiens
cccccttgcccctacccagccagtagtagttccccagcgtgcgcccggggagaccgggaacatggcgctgggagcgctgtagcagctgagaaggggctgaggcaccgccgcttcgctgacagccggccaccagaaatacactgtggtgaaatgcttccacctcttgctaaaatgaacactgaggaaaaatgaagaagactgacaagcaccagcgaaaagttgcagaatagaaatagccacactcctctggagtctttaattcatccacagccatcatataaaggttttggcatcatgtttgggaagaaaaagaaaaagattgaaatatctggcccgtccaactttgaacacagggttcatactgggtttgatccacaagagcagaagtttaccggccttccccagcagtggcacagcctgttagcagatacggccaacaggccaaagcctatggtggacccttcatgcatcacacccatccagctggctcctatgaagacaatcgttagaggaaacaaaccctgcaaggaaacctccatcaacggcctgctagaggattttgacaacatctcggtgactcgctccaactccctaaggaaagaaagcccacccaccccagatcagggagcctccagccacggtccaggccacgcggaagaaaatggcttcatcaccttctcccagtattccagcgaatccgatactactgctgactacacgaccgaaaagtacagggagaagagtctctatggagatgatctggatccgtattatagaggcagccacgcagccaagcaaaatgggcacgtaatgaaaatgaagcacggggaggcctactattctgaggtgaagcctttgaaatccgattttgccagattttctgccgattatcactcacatttggactcactgagcaaaccaagtgaatacagtgacctcaagtgggagtatcagagagcctcgagtagctcccctctggattattcattccaattcacaccttctagaactgcagggaccagcgggtgctccaaggagagcctggcgtacagtgaaagtgaatggggacccagcctggatgactatgacaggaggccaaagtcttcgtacctgaatcagacaagccctcagcccaccatgcggcagaggtccaggtcaggctcgggactccaggaaccgatgatgccatttggagcaagtgcatttaaaacccatccccaaggacactcctacaactcctacacctaccctcgcttgtccgagcccacaatgtgcattccaaaggtggattacgatcgagcacagatggtcctcagccctccactgtcagggtctgacacctaccccaggggccctgccaaactacctcaaagtcaaagcaaatcgggctattcctcaagcagtcaccagtacccgtctgggtaccacaaagccaccttgtaccatcacccctccctgcagagcagttcgcagtacatctccacggcttcctacctgagctccctcagcctctcatccagcacctacccgccgcccagctggggctcctcctccgaccagcagccctccagggtgtcccatgaacagtttcgggcggccctgcagctggtggtcagcccaggagaccccagggaatacttggccaactttatcaaaatcggggaaggctcaaccggcatcgtatgcatcgccaccgagaaacacacagggaaacaagttgcagtgaagaaaatggacctccggaagcaacagagacgagaactgcttttcaatgaggtcgtgatcatgcgggattaccaccatgacaatgtggttgacatgtacagcagctaccttgtcggcgatgagctctgggtggtcatggagtttctagaaggtggtgccttgacagacattgtgactcacaccagaatgaatgaagaacagatagctactgtctgcctgtcagttctgagagctctctcctaccttcataaccaaggagtgattcacagggacataaaaagtgactccatcctcctgacaagcgatggccggataaagttgtctgattttggtttctgtgctcaagtttccaaagaggtgccgaagaggaaatcattggttggcactccctactggatggcccctgaggtgatttctaggctaccttatgggacagaggtggacatctggtccctcgggatcatggtgatagaaatgattgatggcgagcccccctacttcaatgagcctcccctccaggcgatgcggaggatccgggacagtttacctccaagagtgaaggacctacacaaggtttcttcagtgctccggggattcctagacttgatgttggtgagggagccctctcagagagcaacagcccaggaactcctcggacatccattcttaaaactagcaggtccaccgtcttgcatcgtccccctcatgagacaatacaggcatcactgagcagaggattcgtgtaggtggcaaagctagatgaggacatgagaataattcaggagaacaaaaggaaacacagaacatgcaaaaggcctgtgcattctagaccagccaattggtgggacagcgtgatgaccggcagggttcaacagaccagggcatcttcttgtgtcttaaacaggcatctctccactgacagccggtgtggtcacttggagcacggctttaataagtcattattatatttttcagcccttcatccagcaaatcagaaggactcagtacaaactccgttatgatatatcctagccacatgcagggtaacatgtaggattttctatattgaaagaatacttttctggcaaaaaaaaaaaaaaaagaaagaaaggaaaacaaaaagcacttttttcttaatggtagcagtataatgtattttgcaacgaatttgtaatttttctgtacgatagttttgataatttatagtactttgatgtcatgtagccattgtatcagttgaagtaatacttgtttactagaggagtttgaacaaagcctttcctacttttttatccctttaagagaaccaatgattctttaggaactttgaatactgaatgactctcaatcaccgtcagctttagtaaaatctctttcttatcctaacaagtgtcttatttggtggaagaagaattaagagtgatggtgatggtgtgcacgtttcattaatccaaccaaaaataatgaaataaaatttgagccacagtataccactccttgggataaagttaaatatttttaaagatcacattttccatgaacgcctctagtagcaaaccattcttttgcacaccacaatgtttccctcagtgccctttctcaaatgggtacaatgttcccttgtggccaaatttccctcccagggagcaatttcagtgctaggatcattggattcagttcccaaaatagaatgtttcagtgagaccatgagaattccaggctcacaaagggagaggagagaacagggcaagacgtttggtttcatttgtcaccatttttaaaactctgtatgctagcacaccaaactcttgtctatatttacctttgtaccacagtattaatcgctattgttcatgtatcgtgctggaagtctgaactgactctagaggatgaattagcaagagggtattttaccaggtatgatctgacttcagttgtgcccatgttataatgtgtttccgacataggagagtcgtgctgctgtctagatcttcttgaatgttgataaaaatgaatgactactacaatacattttgtgttgcttgttggatgaatttgcatgttaactgtaggccaatatagatttgcctttaaaactctggaagagctacatagtcatcattagtttctattaattatgcatcagacaaaagccatttgttaccaaactgggaaaacagaggcttttcttaactatttcacatactgtaacaaatatgaatttaaatttgtgatagcgctctggttgctctaagcataattaagaatttttgtaattaataggttgctaattatttatcactgctaaaaaggaaaaaaggcataaaatgaccttctactgattagattttcagttttctttcaaactggaaatgcctccataaatatgatctatgattttgcttcataaaacagcaaatcaatgttttatgtaaaatattaaagcattaatataaatatgtgagaataaaaacaatctaaatccagaaaatggcagtcctaaatgttcatgagacagattgtattaatttaaccaggactatgtagaagtagaaagaaaagaaaaagaaaatcttttttaaaccagaataaacattaaaaactattgcagaaaatagtggattttggattccaaacattttcgacagtgtaatggaaatttttctgtaattttcttaccatcgggtattttttaaagtattcattgagtttaccaaaagttactgtagcttaaaaggttttgtgagcactaactattggcagaaactgcatttgcaaataaaaataaatgtttgccttttc

SEQ ID NO: 10733 - protein, 719 aa, Homo sapiens; identical to SEQ ID NO: 1651

SEQ ID NO: 10734 - DNA, 4308 bp, Homo sapiens
ggagcagctgcgtacgctcatggacagtcctccgaggggcgaagccgggcagctgggcatgctcatagtagttccccagcgtgcgcccggggagaccgggaacatggcgctgggagcgctgtagcagctgagaaggggctgaggcaccgccgcttcgctgacagccggccaccagaaatacactgtggtgaaatgcttccacctcttgctaaaatgaacactgaggaaaaatgaagaagactgacaagcaccagcgaaaagttgcagaatagaaatagccacactcctctggagtctttaattcatccacagccatcatataaaggttttggcatcatgtttgggaagaaaaagaaaaagattgaaatatctggcccgtccaactttgaacacagggttcatactgggtttgatccacaagagcagaagtttaccggccttccccagcagtggcacagcctgttagcagatacggccaacaggccaaagcctatggtggacccttcatgcatcacacccatccagctggctcctatgaagacaatcgttagaggaaacaaaccctgcaaggaaacctccatcaacggcctgctagaggattttgacaacatctcggtgactcgctccaactccctaaggaaagaaagcccacccaccccagatcagggagcctccagccacggtccaggccacgcggaagaaaatggcttcatcaccttctcccagtattccagcgaatccgatactactgctgactacacgaccgaaaagtacagggagaagagtctctatggagatgatctggatccgtattatagaggcagccacgcagccaagcaaaatgggcacgtaatgaaaatgaagcacggggaggcctactattctgaggtgaagcctttgaaatccgattttgccagattttctgccgattatcactcacatttggactcactgagcaaaccaagtgaatacagtgacctcaagtgggagtatcagagagcctcgagtagctcccctctggattattcattccaattcacaccttctagaactgcagggaccagcgggtgctccaaggagagcctggcgtacagtgaaagtgaatggggacccagcctggatgactatgacaggaggccaaagtcttcgtacctgaatcagacaagccctcagcccaccatgcggcagaggtccaggtcaggctcgggactccaggaaccgatgatgccatttggagcaagtgcatttaaaacccatccccaaggacactcctacaactcctacacctaccctcgcttgtccgagcccacaatgtgcattccaaaggtggattacgatcgagcacagatggtcctcagccctccactgtcagggtctgacacctaccccaggggccctgccaaactacctcaaagtcaaagcaaatcgggctattcctcaagcagtcaccagtacccgtctgggtaccacaaagccaccttgtaccatcacccctccctgcagagcagttcgcagtacatctccacggcttcctacctgagctccctcagcctctcatccagcacctacccgccgcccagctggggctcctcctccgaccagcagccctccagggtgtcccatgaacagtttcgggcggccctgcagctggtggtcagcccaggagaccccagggaatacttggccaactttatcaaaatcggggaaggctcaaccggcatcgtatgcatcgccaccgagaaacacacagggaaacaagttgcagtgaagaaaatggacctccggaagcaacagagacgagaactgcttttcaatgaggtcgtgatcatgcgggattaccaccatgacaatgtggttgacatgtacagcagctaccttgtcggcgatgagctctgggtggtcatggagtttctagaaggtggtgccttgacagacattgtgactcacaccagaatgaatgaagaacagatagctactgtctgcctgtcagttctgagagctctctcctaccttcataaccaaggagtgattcacagggacataaaaagtgactccatcctcctgacaagcgatggccgggtttcttcagtgctccggggattcctagacttgatgttggtgagggagccctctcagagagcaacagcccaggaactcctcggacatccattcttaaaactagcaggtccaccgtcttgcatcgtccccctcatgagacaatacaggcatcactgagcagaggattcgtgtaggtggcaaagctagatgaggacatgagaataattcaggagaacaaaaggaaacacagaacatgcaaaaggcctgtgcattctagaccagccaattggtgggacagcgtgatgaccggcagggttcaacagaccagggcatcttcttgtgtcttaaacaggcatctctccactgacagccggtgtggtcacttggagcacggctttaataagtcattattatatttttcagcccttcatccagcaaatcagaaggactcagtacaaactccgttatgatatatcctagccacatgcagggtaacatgtaggattttctatattgaaagaatacttttctggcaaaaaaaaaaaaaaaagaaagaaaggaaaacaaaaagcacttttttcttaatggtagcagtataatgtattttgcaacgaatttgtaatttttctgtacgatagttttgataatttatagtactttgatgtcatgtagccattgtatcagttgaagtaatacttgtttactagaggagtttgaacaaagcctttcctacttttttatccctttaagagaaccaatgattctttaggaactttgaatactgaatgactctcaatcaccgtcagctttagtaaaatctctttcttatcctaacaagtgtcttatttggtggaagaagaattaagagtgatggtgatggtgtgcacgtttcattaatccaaccaaaaataatgaaataaaatttgagccacagtataccactccttgggataaagttaaatatttttaaagatcacattttccatgaacgcctctagtagcaaaccattcttttgcacaccacaatgtttccctcagtgccctttctcaaatgggtacaatgttcccttgtggccaaatttccctcccagggagcaatttcagtgctaggatcattggattcagttcccaaaatagaatgtttcagtgagaccatgagaattccaggctcacaaagggagaggagagaacagggcaagacgtttggtttcatttgtcaccatttttaaaactctgtatgctagcacaccaaactcttgtctatatttacctttgtaccacagtattaatcgctattgttcatgtatcgtgctggaagtctgaactgactctagaggatgaattagcaagagggtattttaccaggtatgatctgacttcagttgtgcccatgttataatgtgtttccgacataggagagtcgtgctgctgtctagatcttcttgaatgttgataaaaatgaatgactactacaatacattttgtgttgcttgttggatgaatttgcatgttaactgtaggccaatatagatttgcctttaaaactctggaagagctacatagtcatcattagtttctattaattatgcatcagacaaaagccatttgttaccaaactgggaaaacagaggcttttcttaactatttcacatactgtaacaaatatgaatttaaatttgtgatagcgctctggttgctctaagcataattaagaatttttgtaattaataggttgctaattatttatcactgctaaaaaggaaaaaaggcataaaatgaccttctactgattagattttcagttttctttcaaactggaaatgcctccataaatatgatctatgattttgcttcataaaacagcaaatcaatgttttatgtaaaatattaaagcattaatataaatatgtgagaataaaaacaatctaaatccagaaaatggcagtcctaaatgttcatgagacagattgtattaatttaaccaggactatgtagaagtagaaagaaaagaaaaagaaaatcttttttaaaccagaataaacattaaaaactattgcagaaaatagtggattttggattccaaacattttcgacagtgtaatggaaatttttctgtaattttcttaccatcgggtattttttaaagtattcattgagtttaccaaaagttactgtagcttaaaaggttttgtgagcactaactattggcagaaactgcatttgcaaataaaaataaatgtttgccttttc

SEQ ID NO: 10735 - protein, 632 aa, Homo sapiens
MFGKKKKKIEISGPSNFEHRVHTGFDPQEQKFTGLPQQWHSLLADTANRPKPMVDPSCITPIQLAPMKTIVRGNKPCKETSINGLLEDFDNISVTRSNSLRKESPPTPDQGASSHGPGHAEENGFITFSQYSSESDTTADYTTEKYREKSLYGDDLDPYYRGSHAAKQNGHVMKMKHGEAYYSEVKPLKSDFARFSADYHSHLDSLSKPSEYSDLKWEYQRASSSSPLDYSFQFTPSRTAGTSGCSKESLAYSESEWGPSLDDYDRRPKSSYLNQTSPQPTMRQRSRSGSGLQEPMMPFGASAFKTHPQGHSYNSYTYPRLSEPTMCIPKVDYDRAQMVLSPPLSGSDTYPRGPAKLPQSQSKSGYSSSSHQYPSGYHKATLYHHPSLQSSSQYISTASYLSSLSLSSSTYPPPSWGSSSDQQPSRVSHEQFRAALQLVVSPGDPREYLANFIKIGEGSTGIVCIATEKHTGKQVAVKKMDLRKQQRRELLFNEVVIMRDYHHDNVVDMYSSYLVGDELWVVMEFLEGGALTDIVTHTRMNEEQIATVCLSVLRALSYLHNQGVIHRDIKSDSILLTSDGRVSSVLRGFLDLMLVREPSQRATAQELLGHPFLKLAGPPSCIVPLMRQYRHH

SEQ ID NO: 10736 - DNA, 4780 bp, Homo sapiens
cgaaaacccggagcagctgcgtacgctcatggacagtcctccgaggggcgaagccgggcagctgggcatgctcagtagctgggggaggtttgggtggagagtagaaagctgtggctctgcctctcaccccctcccgctggcccccgccccccttgcccctacccagccagtagtagttccccagcgtgcgcccggggagaccgggaacatggcgctgggagcgctgtagcagctgagaaggggctgaggcaccgccgcttcgctgacagccggccaccagatgttcatgcattctagagaaagtggaaaacttagaagcctaattaatgactgtcttctggacctctgagaccatgtttctagtgttttccgtggaatattatcagaaatacactgtggtgaaatgcttccacctcttgctaaaatgaacactgaggaaaaatgaagaagactgacaagcaccagcgaaaagttgcagaatagaaatagccacactcctctggagtctttaattcatccacagccatcatataaaggttttggcatcatgtttgggaagaaaaagaaaaagattgaaatatctggcccgtccaactttgaacacagggttcatactgggtttgatccacaagagcagaagtttaccggccttccccagcagtggcacagcctgttagcagatacggccaacaggccaaagcctatggtggacccttcatgcatcacacccatccagctggctcctatgaagacaatcgttagaggaaacaaaccctgcaaggaaacctccatcaacggcctgctagaggattttgacaacatctcggtgactcgctccaactccctaaggaaagaaagcccacccaccccagatcagggagcctccagccacggtccaggccacgcggaagaaaatggcttcatcaccttctcccagtattccagcgaatccgatactactgctgactacacgaccgaaaagtacagggagaagagtctctatggagatgatctggatccgtattatagaggcagccacgcagccaagcaaaatgggcacgtaatgaaaatgaagcacggggaggcctactattctgaggtgaagcctttgaaatccgattttgccagattttctgccgattatcactcacatttggactcactgagcaaaccaagtgaatacagtgacctcaagtgggagtatcagagagcctcgagtagctcccctctggattattcattccaattcacaccttctagaactgcagggaccagcgggtgctccaaggagagcctggcgtacagtgaaagtgaatggggacccagcctggatgactatgacaggaggccaaagtcttcgtacctgaatcagacaagccctcagcccaccatgcggcagaggtccaggtcaggctcgggactccaggaaccgatgatgccatttggagcaagtgcatttaaaacccatccccaaggacactcctacaactcctacacctaccctcgcttgtccgagcccacaatgtgcattccaaaggtggattacgatcgagcacagatggtcctcagccctccactgtcagggtctgacacctaccccaggggccctgccaaactacctcaaagtcaaagcaaatcgggctattcctcaagcagtcaccagtacccgtctgggtaccacaaagccaccttgtaccatcacccctccctgcagagcagttcgcagtacatctccacggcttcctacctgagctccctcagcctctcatccagcacctacccgccgcccagctggggctcctcctccgaccagcagccctccagggtgtcccatgaacagtttcgggcggccctgcagctggtggtcagcccaggagaccccagggaatacttggccaactttatcaaaatcggggaaggctcaaccggcatcgtatgcatcgccaccgagaaacacacagggaaacaagttgcagtgaagaaaatggacctccggaagcaacagagacgagaactgcttttcaatgaggtcgtgatcatgcgggattaccaccatgacaatgtggttgacatgtacagcagctaccttgtcggcgatgagctctgggtggtcatggagtttctagaaggtggtgccttgacagacattgtgactcacaccagaatgaatgaagaacagatagctactgtctgcctgtcagttctgagagctctctcctaccttcataaccaaggagtgattcacagggacataaaaagtgactccatcctcctgacaagcgatggccggataaagttgtctgattttggtttctgtgctcaagtttccaaagaggtgccgaagaggaaatcattggttggcactccctactggatggcccctgaggtgatttctaggctaccttatgggacagaggtggacatctggtccctcgggatcatggtgatagaaatgattgatggcgagcccccctacttcaatgagcctcccctccaggcgatgcggaggatccgggacagtttacctccaagagtgaaggacctacacaaggtttcttcagtgctccggggattcctagacttgatgttggtgagggagccctctcagagagcaacagcccaggaactcctcggacatccattcttaaaactagcaggtccaccgtcttgcatcgtccccctcatgagacaatacaggcatcactgagcagaggattcgtgtaggtggcaaagctagatgaggacatgagaataattcaggagaacaaaaggaaacacagaacatgcaaaaggcctgtgcattctagaccagccaattggtgggacagcgtgatgaccggcagggttcaacagaccagggcatcttcttgtgtcttaaacaggcatctctccactgacagccggtgtggtcacttggagcacggctttaataagtcattattatatttttcagcccttcatccagcaaatcagaaggactcagtacaaactccgttatgatatatcctagccacatgcagggtaacatgtaggattttctatattgaaagaatacttttctggcaaaaaaaaaaaaaaaagaaagaaaggaaaacaaaaagcacttttttcttaatggtagcagtataatgtattttgcaacgaatttgtaatttttctgtacgatagttttgataatttatagtactttgatgtcatgtagccattgtatcagttgaagtaatacttgtttactagaggagtttgaacaaagcctttcctacttttttatccctttaagagaaccaatgattctttaggaactttgaatactgaatgactctcaatcaccgtcagctttagtaaaatctctttcttatcctaacaagtgtcttatttggtggaagaagaattaagagtgatggtgatggtgtgcacgtttcattaatccaaccaaaaataatgaaataaaatttgagccacagtataccactccttgggataaagttaaatatttttaaagatcacattttccatgaacgcctctagtagcaaaccattcttttgcacaccacaatgtttccctcagtgccctttctcaaatgggtacaatgttcccttgtggccaaatttccctcccagggagcaatttcagtgctaggatcattggattcagttcccaaaatagaatgtttcagtgagaccatgagaattccaggctcacaaagggagaggagagaacagggcaagacgtttggtttcatttgtcaccatttttaaaactctgtatgctagcacaccaaactcttgtctatatttacctttgtaccacagtattaatcgctattgttcatgtatcgtgctggaagtctgaactgactctagaggatgaattagcaagagggtattttaccaggtatgatctgacttcagttgtgcccatgttataatgtgtttccgacataggagagtcgtgctgctgtctagatcttcttgaatgttgataaaaatgaatgactactacaatacattttgtgttgcttgttggatgaatttgcatgttaactgtaggccaatatagatttgcctttaaaactctggaagagctacatagtcatcattagtttctattaattatgcatcagacaaaagccatttgttaccaaactgggaaaacagaggcttttcttaactatttcacatactgtaacaaatatgaatttaaatttgtgatagcgctctggttgctctaagcataattaagaatttttgtaattaataggttgctaattatttatcactgctaaaaaggaaaaaaggcataaaatgaccttctactgattagattttcagttttctttcaaactggaaatgcctccataaatatgatctatgattttgcttcataaaacagcaaatcaatgttttatgtaaaatattaaagcattaatataaatatgtgagaataaaaacaatctaaatccagaaaatggcagtcctaaatgttcatgagacagattgtattaatttaaccaggactatgtagaagtagaaagaaaagaaaaagaaaatcttttttaaaccagaataaacattaaaaactattgcagaaaatagtggattttggattccaaacattttcgacagtgtaatggaaatttttctgtaattttcttaccatcgggtattttttaaagtattcattgagtttaccaaaagttactgtagcttaaaaggttttgtgagcactaactattggcagaaactgcatttgcaaataaaaataaatgtttgccttttc

SEQ ID NO: 10737 - protein, 719 aa, Homo sapiens; identical to SEQ ID NO: 1651

SEQ ID NO: 10738 - DNA, 366 bp, Homo sapiens
acccaacctaaggaactggaatctgcattttaacaagatgccctggtgatttttttgtagagtttgggacaccacttgaggccaagacctctgagtgtaacaacagactgagagaattcctgattggggatctggaaactccaggagattggacctgcaccagagagaaaatttggaagagatggaggcagatgtggagccatggaagtcaaatgctgaggatggtggcatcataggatgaatggagctgggttcttgaaacactgcctggaggaaagacagcaaaaatgcctcatgaatccaactggactgttaggatgctcacccttggagaccagcaacaatgtgtgcagaaacccaggccat

SEQ ID NO: 10739 - protein, 42 aa, Homo sapiens
MNGAGFLKHCLEERQQKCLMNPTGLLGCSPLETSNNVCRNPG

SEQ ID NO: 10740 - DNA, 1408 bp, Homo sapiens
gaatattcatcttatttatcctgtatttcatattttaaattatatgcttgtggggcttttatgttggctaggaataaatatacttttaaatggttgtttgctccacttttgcttatacaacttgtattttctaatctttaaaaaataggaacacagcctattggatccctaggctcaatatgtcctaatagttatggaagtgtgaaagatgtgtgcactgcaaaatttggctccaaacatttttttcatcttattcctaatgaagcaacaatctgcagcttgcttctctgcaacagaaatgacactgcctgggatgagctgaagctcacgtgtcagacggcactgcatgtcctgcagttaacactcaaggaaccatgggctttgttgggaggtggctgtactgaaactcatttggctgcatatatcagacacaagactcacaacgacccagaaagcattctcaaagatgatgaatgtactcaaacagaacttcaattaattgctgaagcattttgcagtgccctagaatctgttgttggctctttagaacatgatggaggtgaaattctcactgacatgaagtatggacacctttggtcagttcaggcagattctccctgtgttgctaactggccagatttgctttcacagtgtggctgtggattatacaatagccaggaagaactcaactggtctttcttaagaagcacacgtcgtccatttgtgccacaaagctgccttccacatgaagctgtgggctcagccagcaacctgaccttggactgtttgactgcaaagcttagtggcctacaggtggctgtagagacagccaatttgattttggatctttcatatgttattgaagataaaaactaagagaatagcatgttcgtattacaagagaaacaaataaactagtctgttggcaattgagaaaaattgtgagtgtatttgttttctcccaaagccctgttctacatatttggacaaatgactcataaaattatagatacacttatttaggaaaaaaggtgattcgtgaatggaaatgccatgaaacaataaaaatatgaagcattatttatttaaaaatattatagttatcttagggattctatactggctgctgtacattgttctaaatttttgttatgttggcatcattttgagagcaaacaaataaaaaagactcctaatccatgctctagtttggatatacatattttagatattttccagttagcagtaattacatatgcttaaagtataaaactagatctcaaagtgtcacaaaacattcagtatatattgctcaatcaaaagaagtattcaaactgcacatttagtaaaatttcacttttctccatgccctttatctcaagctatattcttcagtggttaggtaatt

SEQ ID NO: 10741 - protein, 99 aa, Homo sapiens
MKYGHLWSVQADSPCVANWPDLLSQCGCGLYNSQEELNWSFLRSTRRPFVPQSCLPHEAVGSASNLTLDCLTAKLSGLQVAVETANLILDLSYVIEDKN

SEQ ID NO: 10742 - DNA, 1834 bp, Homo sapiens
attgtcaagcgctcaccaaaaggcagaagctgtgccattttgatatgttatttaaattttatgcgttcttttaaaatttcagtttcaacaatttgctggaatatacgctgaataaacttcgctccccgttttttccggtgacggccgctgttggctggagcttcacggaaaacccggagaagcggagtgggggcggcccggcgtcgaccgcagagctgcgcgtgctccgtgccctcgcgcgacgcgaaggttgtcgggatccgcggcagcagcggctgcttgagatctgtttctggggcctctggcggtggcggcctggggcggcgcgacggctggtgcgcaggtacactgatgctgaagtactatgagccttcggaacttgtggagagactacaaagttttggttgttatggtccctttagttgggctcatacatttggggtggtacagaatcaaaagcagccctgttttccaaatacctaaaaacgacgacattcctgagcaagatagtctgggactttcaaatcttcagaagagccaaatccaggggaagtagcaggcttgcaatcttcaggaacacagcctattggatccctaggctcaatatgtcctaatagttatggaagtgtgaaagatgtgtgcactgcaaaatttggctccaaacatttttttcatcttattcctaatgaagcaacaatctgcagcttgcttctctgcaacagaaatgacactgcctgggatgagctgaagctcacgtgtcagacggcactgcatgtcctgcagttaacactcaaggaaccatgggctttgttgggaggtggctgtactgaaactcatttggctgcatatatcagacacaagactcacaacgacccagaaagcattctcaaagatgatgaatgtactcaaacagaacttcaattaattgctgaagcattttgcagtgccctagaatctgttgttggctctttagaacatgatggaggtgaaattctcactgacatgaagtatggacacctttggtcagttcaggcagattctccctgtgttgctaactggccagatttgctttcacagtgtggctgtggattatacaatagccaggaagaactcaactggtctttcttaagaagcacacgtcgtccatttgtgccacaaagctgccttccacatgaagctgtgggctcagccagcaacctgaccttggactgtttgactgcaaagcttagtggcctacaggtggctgtagagacagccaatttgattttggatctttcatatgttattgaagataaaaactaagagaatagcatgttcgtattacaagagaaacaaataaactagtctgttggcaattgagaaaaattgtgagtgtatttgttttctcccaaagccctgttctacatatttggacaaatgactcataaaattatagatacacttatttaggaaaaaaggtgattcgtgaatggaaatgccatgaaacaataaaaatatgaagcattatttatttaaaaatattatagttatcttagggattctatactggctgctgtacattgttctaaatttttgttatgttggcatcattttgagagcaaacaaataaaaaagactcctaatccatgctctagtttggatatacatattttagatattttccagttagcagtaattacatatgcttaaagtataaaactagatctcaaagtgtcacaaaacattcagtatatattgctcaatcaaaagaagtattcaaactgcacatttagtaaaatttcacttttctccatgccctttatctcaagctatattcttcagtggttaggtaatt

SEQ ID NO: 10743 - protein, 99 aa, Homo sapiens; identical to SEQ ID NO: 10741

SEQ ID NO: 10744 - DNA, 3236 bp, Homo sapiens
attgtcaagcgctcaccaaaaggcagaagctgtgccattttgatatgttatttaaattttatgcgttcttttaaaatttcagtttcaacaatttgctggaatatacgctgaataaacttcgctccccgttttttccggtgacggccgctgttggctggagcttcacggaaaacccggagaagcggagtgggggcggcccggcgtcgaccgcagagctgcgcgtgctccgtgccctcgcgcgacgcgaaggttgtcgggatccgcggcagcagcggctgcttgagatctgtttctggggcctctggcggtggcggcctggggcggcgcgacggctggtgcgcaggtacactgatgctgaagtactatgagccttcggaacttgtggagagactacaaagttttggttgttatggtccctttagttgggctcatacatttggggtggtacagaatcaaaagcagccctgttttccaaatacctaaaaacgacgacattcctgagcaagatagtctgggactttcaaatcttcagaagagccaaatccaggggaagtagcaggcttgcaatcttcaggtaaagaagcagctttgaatctgagcttcatatcgaaagaagagatgaaaaataccagttggattagaaagaactggcttcttgtagctgggatatctttcataggtgtccatcttggaacatactttttgcagaggtctgcaaagcagtctgtaaaatttcagtctcaaagcaaacaaaagagtattgaagagtgaagtaaaataaatatttggaattactaatttgtcattaaatcattctatgctgattagcttcataaacattgaactttttgattttatagccacaatgctgcatattcatactttaattcctaaagaataatttttaatgttaaaacgtgataatgcaataaatagaaaaatgtggtttacaaaataaaaacggtcttcactagttaccacctgaagtaagatgtctcgtttggaagctaagaagccatcattgtgtaagagtgaaccactgacaactgagagagtcaggaccacactttctgtcttgaaaagaattgtaacatcatgctatggcccctcaggtaggctgaagcagctgcacaatggctttggaggttacgtgtgtacaacctcacagtcctcagctctgctcagtcaccttttggtcacacatcccattttaaagatcctgacagcctccatacagaatcatgtgtcaagcttcagtgattgtggcttattcacagctattctttgctgcaacctgattgaaaatgttcagagattaggcttgacacccaccactgtcattagattaaataaacatcttttgagtctttgcatcagttatctcaagtctgagacctgtggttgtcgaatcccagtggactttagtagtactcagatcctcctttgtttggtgcgtagtatattaacaagtaaacctgcctgtatgctcaccagaaaggaaacagagcatgtcagtgctttgatcctgagagcctttttgcttacaattccagaaaatgctgaaggccacatcattttaggaaagagtttaattgtacctttaaaaggtcaaagagttatagattccactgtattacctgggatactcattgaaatgtcagaagttcaattaatgaggctattacctatcaaaaaatcaactgccctcaaggtggcactcttttgtacaactttatccggagacacttctgacactggagaaggaactgtggtggtcagttatggggtttctcttgaaaatgcagtcttggaccagctgcttaacctaggaaggcagctaatcagtgaccacgtagatcttgtcctgtgccaaaaagttatacatccatctttgaagcagtttctcaatatgcatcgtattattgccatagacagaattggagtgactctgatggaacccctgactaaaatgacaggaacacagcctattggatccctaggctcaatatgtcctaatagttatggaagtgtgaaagatgtgtgcactgcaaaatttggctccaaacatttttttcatcttattcctaatgaagcaacaatctgcagcttgcttctctgcaacagaaatgacactgcctgggatgagctgaagctcacgtgtcagacggcactgcatgtcctgcagttaacactcaaggaaccatgggctttgttgggaggtggctgtactgaaactcatttggctgcatatatcagacacaagactcacaacgacccagaaagcattctcaaagatgatgaatgtactcaaacagaacttcaattaattgctgaagcattttgcagtgccctagaatctgttgttggctctttagaacatgatggaggtgaaattctcactgacatgaagtatggacacctttggtcagttcaggcagattctccctgtgttgctaactggccagatttgctttcacagtgtggctgtggattatacaatagccaggaagaactcaactggtctttcttaagaagcacacgtcgtccatttgtgccacaaagctgccttccacatgaagctgtgggctcagccagcaacctgaccttggactgtttgactgcaaagcttagtggcctacaggtggctgtagagacagccaatttgattttggatctttcatatgttattgaagataaaaactaagagaatagcatgttcgtattacaagagaaacaaataaactagtctgttggcaattgagaaaaattgtgagtgtatttgttttctcccaaagccctgttctacatatttggacaaatgactcataaaattatagatacacttatttaggaaaaaaggtgattcgtgaatggaaatgccatgaaacaataaaaatatgaagcattatttatttaaaaatattatagttatcttagggattctatactggctgctgtacattgttctaaatttttgttatgttggcatcattttgagagcaaacaaataaaaaagactcctaatccatgctctagtttggatatacatattttagatattttccagttagcagtaattacatatgcttaaagtataaaactagatctcaaagtgtcacaaaacattcagtatatattgctcaatcaaaagaagtattcaaactgcacatttagtaaaatttcacttttctccatgccctttatctcaagctatattcttcagtggttaggtaatt

SEQ ID NO: 10745 - protein, 570 aa, Homo sapiens; identical to SEQ ID NO: 1655

SEQ ID NO: 10746 - DNA, 934 bp, Homo sapiens
gaatattcatcttatttatcctgtatttcatattttaaattatatgcttgtggggcttttatgttggctaggaataaatatacttttaaatggttgtttgctccacttttgcttatacaacttgtattttctaatctttaaaaaataggaacacagcctattggatccctaggctcaatatgtcctaatagttatggaagtgtgaaagatgtgtgcactgcaaaatttggctccaaacatttttttcatcttattcctaatgaagcaacaatctgcagcttgcttctctgcaacagaaatgacactgcctgggatgagctgaagctcacgtgtcagacggcactgcatgtcctgcagttaacactcaaggaaccatgggctttgttgggaggtggctgtactgaaactcatttggctgcatatatcagacacaagactcacaacgacccagaaagcattctcaaagatgatgaatgtactcaaacagaacttcaattaattgctgaagcattttgcagtgccctagaatctgttgttggctctttagaacatgatggaggtgaaattctcactgacatgaagtatggacacctttggtcagttcaggcagattctccctgtgttgctaactggccagatttgctttcacagtgtggctgtggattatacaatagccaggaagaactcaactggtctttcttaagaagcacacgtcgtccatttgtgccacaaagctgccttccacatgaagctgtgggctcagccagcaacctgaccttggactgtttgactgcaaagcttagtggcctacaggtggctgtagagacagccaatttgattttggatctttcatatgttattgaagataaaaactaagagaatagcatgttcgtattacaagagaaacaaataaactagtctgttggcaattgag

SEQ ID NO: 10747 - protein, 99 aa, Homo sapiens; identical to SEQ ID NO: 10741

SEQ ID NO: 10748 - DNA, 2658 bp, Homo sapiens
gggaaaacactttaggttgagtgctgagagaaaggctctctgagtaggtgacatctgaactaagagctgaagcagaagaataagccatcctctgtggaccaaaggggacaagattctctacttttctgctacgcactaggaatatagcagagaagacaagtggctgctaccttctgttatcgtgggtggcagtgactagtttttctagatcttgactccctgccgtaactaaagatggagtacactgatgctgaagtactatgagccttcggaacttgtggagagactacaaagttttggttgttatggtccctttagttgggctcatacatttggggtggtacagaatcaaaagcagccctgttttccaaatacctaaaaacgacgacattcctgagcaagatagtctgggactttcaaatcttcagaagagccaaatccaggggaagtagcaggcttgcaatcttcaggtaaagaagcagctttgaatctgagcttcatatcgaaagaagagatgaaaaataccagttggattagaaagaactggcttcttgtagctgggatatctttcataggtgtccatcttggaacatactttttgcagaggtctgcaaagcagtctgtaaaatttcagtctcaaagcaaacaaaagagtattgaagagtgaagtaaaataaatatttggaattactaatttgtcattaaatcattctatgctgattagcttcataaacattgaactttttgattttatagccacaatgctgcatattcatactttaattcctaaagaataatttttaatgttaaaacgtgataatgcaataaatagaaaaatgtggtttacaaaataaaaacggtcttcactagttaccacctgaagtaagatgtctcgtttggaagctaagaagccatcattgtgtaagagtgaaccactgacaactgagagagtcaggaccacactttctgtcttgaaaagaattgtaacatcatgctatggcccctcaggtaggctgaagcagctgcacaatggctttggaggttacgtgtgtacaacctcacagtcctcagctctgctcagtcaccttttggtcacacatcccattttaaagatcctgacagcctccatacagaatcatgtgtcaagcttcagtgattgtggcttattcacagctattctttgctgcaacctgattgaaaatgttcagagattaggcttgacacccaccactgtcattagattaaataaacatcttttgagtctttgcatcagttatctcaagtctgagacctgtggttgtcgaatcccagtggactttagtagtactcagatcctcctttgtttggtgcgtagtatattaacaagtaaacctgcctgtatgctcaccagaaaggaaacagagcatgtcagtgctttgatcctgagagcctttttgcttacaattccagaaaatgctgaaggccacatcattttaggaaagagtttaattgtacctttaaaaggtcaaagagttatagattccactgtattacctgggatactcattgaaatgtcagaagttcaattaatgaggctattacctatcaaaaaatcaactgccctcaaggtggcactcttttgtacaactttatccggagacacttctgacactggagaaggaactgtggtggtcagttatggggtttctcttgaaaatgcagtcttggaccagctgcttaacctaggaaggcagctaatcagtgaccacgtagatcttgtcctgtgccaaaaagttatacatccatctttgaagcagtttctcaatatgcatcgtattattgccatagacagaattggagtgactctgatggaacccctgactaaaatgacaggaacacagcctattggatccctaggctcaatatgtcctaatagttatggaagtgtgaaagatgtgtgcactgcaaaatttggctccaaacatttttttcatcttattcctaatgaagcaacaatctgcagcttgcttctctgcaacagaaatgacactgcctgggatgagctgaagctcacgtgtcagacggcactgcatgtcctgcagttaacactcaaggaaccatgggctttgttgggaggtggctgtactgaaactcatttggctgcatatatcagacacaagactcacaacgacccagaaagcattctcaaagatgatgaatgtactcaaacagaacttcaattaattgctgaagcattttgcagtgccctagaatctgttgttggctctttagaacatgatggaggtgaaattctcactgacatgaagtatggacacctttggtcagttcaggcagattctccctgtgttgctaactggccagatttgctttcacagtgtggctgtggattatacaatagccaggaagaactcaactggtctttcttaagaagcacacgtcgtccatttgtgccacaaagctgccttccacatgaagctgtgggctcagccagcaacctgaccttggactgtttgactgcaaagcttagtggcctacaggtggctgtagagacagccaatttgattttggatctttcatatgttattgaagataaaaactaagagaatagcatgttcgtattacaagagaaacaaataaactagtctgttggcaattgag

SEQ ID NO: 10749 - protein, 570 aa, Homo sapiens; identical to SEQ ID NO: 1655

SEQ ID NO: 10750 - DNA, 2762 bp, Homo sapiens
attgtcaagcgctcaccaaaaggcagaagctgtgccattttgatatgttatttaaattttatgcgttcttttaaaatttcagtttcaacaatttgctggaatatacgctgaataaacttcgctccccgttttttccggtgacggccgctgttggctggagcttcacggaaaacccggagaagcggagtgggggcggcccggcgtcgaccgcagagctgcgcgtgctccgtgccctcgcgcgacgcgaaggttgtcgggatccgcggcagcagcggctgcttgagatctgtttctggggcctctggcggtggcggcctggggcggcgcgacggctggtgcgcaggtacactgatgctgaagtactatgagccttcggaacttgtggagagactacaaagttttggttgttatggtccctttagttgggctcatacatttggggtggtacagaatcaaaagcagccctgttttccaaatacctaaaaacgacgacattcctgagcaagatagtctgggactttcaaatcttcagaagagccaaatccaggggaagtagcaggcttgcaatcttcaggtaaagaagcagctttgaatctgagcttcatatcgaaagaagagatgaaaaataccagttggattagaaagaactggcttcttgtagctgggatatctttcataggtgtccatcttggaacatactttttgcagaggtctgcaaagcagtctgtaaaatttcagtctcaaagcaaacaaaagagtattgaagagtgaagtaaaataaatatttggaattactaatttgtcattaaatcattctatgctgattagcttcataaacattgaactttttgattttatagccacaatgctgcatattcatactttaattcctaaagaataatttttaatgttaaaacgtgataatgcaataaatagaaaaatgtggtttacaaaataaaaacggtcttcactagttaccacctgaagtaagatgtctcgtttggaagctaagaagccatcattgtgtaagagtgaaccactgacaactgagagagtcaggaccacactttctgtcttgaaaagaattgtaacatcatgctatggcccctcaggtaggctgaagcagctgcacaatggctttggaggttacgtgtgtacaacctcacagtcctcagctctgctcagtcaccttttggtcacacatcccattttaaagatcctgacagcctccatacagaatcatgtgtcaagcttcagtgattgtggcttattcacagctattctttgctgcaacctgattgaaaatgttcagagattaggcttgacacccaccactgtcattagattaaataaacatcttttgagtctttgcatcagttatctcaagtctgagacctgtggttgtcgaatcccagtggactttagtagtactcagatcctcctttgtttggtgcgtagtatattaacaagtaaacctgcctgtatgctcaccagaaaggaaacagagcatgtcagtgctttgatcctgagagcctttttgcttacaattccagaaaatgctgaaggccacatcattttaggaaagagtttaattgtacctttaaaaggtcaaagagttatagattccactgtattacctgggatactcattgaaatgtcagaagttcaattaatgaggctattacctatcaaaaaatcaactgccctcaaggtggcactcttttgtacaactttatccggagacacttctgacactggagaaggaactgtggtggtcagttatggggtttctcttgaaaatgcagtcttggaccagctgcttaacctaggaaggcagctaatcagtgaccacgtagatcttgtcctgtgccaaaaagttatacatccatctttgaagcagtttctcaatatgcatcgtattattgccatagacagaattggagtgactctgatggaacccctgactaaaatgacaggaacacagcctattggatccctaggctcaatatgtcctaatagttatggaagtgtgaaagatgtgtgcactgcaaaatttggctccaaacatttttttcatcttattcctaatgaagcaacaatctgcagcttgcttctctgcaacagaaatgacactgcctgggatgagctgaagctcacgtgtcagacggcactgcatgtcctgcagttaacactcaaggaaccatgggctttgttgggaggtggctgtactgaaactcatttggctgcatatatcagacacaagactcacaacgacccagaaagcattctcaaagatgatgaatgtactcaaacagaacttcaattaattgctgaagcattttgcagtgccctagaatctgttgttggctctttagaacatgatggaggtgaaattctcactgacatgaagtatggacacctttggtcagttcaggcagattctccctgtgttgctaactggccagatttgctttcacagtgtggctgtggattatacaatagccaggaagaactcaactggtctttcttaagaagcacacgtcgtccatttgtgccacaaagctgccttccacatgaagctgtgggctcagccagcaacctgaccttggactgtttgactgcaaagcttagtggcctacaggtggctgtagagacagccaatttgattttggatctttcatatgttattgaagataaaaactaagagaatagcatgttcgtattacaagagaaacaaataaactagtctgttggcaattgag

SEQ ID NO: 10751 - protein, 570 aa, Homo sapiens; identical to SEQ ID NO: 1655

SEQ ID NO: 10752 - DNA, 1360 bp, Homo sapiens
attgtcaagcgctcaccaaaaggcagaagctgtgccattttgatatgttatttaaattttatgcgttcttttaaaatttcagtttcaacaatttgctggaatatacgctgaataaacttcgctccccgttttttccggtgacggccgctgttggctggagcttcacggaaaacccggagaagcggagtgggggcggcccggcgtcgaccgcagagctgcgcgtgctccgtgccctcgcgcgacgcgaaggttgtcgggatccgcggcagcagcggctgcttgagatctgtttctggggcctctggcggtggcggcctggggcggcgcgacggctggtgcgcaggtacactgatgctgaagtactatgagccttcggaacttgtggagagactacaaagttttggttgttatggtccctttagttgggctcatacatttggggtggtacagaatcaaaagcagccctgttttccaaatacctaaaaacgacgacattcctgagcaagatagtctgggactttcaaatcttcagaagagccaaatccaggggaagtagcaggcttgcaatcttcaggaacacagcctattggatccctaggctcaatatgtcctaatagttatggaagtgtgaaagatgtgtgcactgcaaaatttggctccaaacatttttttcatcttattcctaatgaagcaacaatctgcagcttgcttctctgcaacagaaatgacactgcctgggatgagctgaagctcacgtgtcagacggcactgcatgtcctgcagttaacactcaaggaaccatgggctttgttgggaggtggctgtactgaaactcatttggctgcatatatcagacacaagactcacaacgacccagaaagcattctcaaagatgatgaatgtactcaaacagaacttcaattaattgctgaagcattttgcagtgccctagaatctgttgttggctctttagaacatgatggaggtgaaattctcactgacatgaagtatggacacctttggtcagttcaggcagattctccctgtgttgctaactggccagatttgctttcacagtgtggctgtggattatacaatagccaggaagaactcaactggtctttcttaagaagcacacgtcgtccatttgtgccacaaagctgccttccacatgaagctgtgggctcagccagcaacctgaccttggactgtttgactgcaaagcttagtggcctacaggtggctgtagagacagccaatttgattttggatctttcatatgttattgaagataaaaactaagagaatagcatgttcgtattacaagagaaacaaataaactagtctgttggcaattgag

SEQ ID NO: 10753 - protein, 99 aa, Homo sapiens; identical to SEQ ID NO: 10741

SEQ ID NO: 10754 - DNA, 880 bp, Homo sapiens
gggaaaacactttaggttgagtgctgagagaaaggctctctgagtaggtgacatctgaactaagagctgaagcagaagaataagccatcctctgtggaccaaaggggacaagattctctacttttctgctacgcactaggaatatagcagagaagacaagtggctgctaccttctgttatcgtgggtggcagtgactagtttttctagatcttgactccctgccgtaactaaagatggagtacactgatgctgaagtactatgagccttcggaacttgtggagagactacaaagttttggttgttatggtccctttagttgggctcatacatttggggtggtacagaatcaaaagcagccctgttttccaaatacctaaaaacgacgacattcctgagcaagatagtctgggactttcaaatcttcagaagagccaaatccaggggaagtagcaggcttgcaatcttcaggtaaagaagcagctttgaatctgagcttcatatcgaaagaagagatgaaaaataccagttggattagaaagaactggcttcttgtagctgggatatctttcataggtgtccatcttggaacatactttttgcagaggtctgcaaagcagtctgtaaaatttcagtctcaaagcaaacaaaagagtattgaagagtgaagtaaaataaatatttggaattactaatttgtcattaaatcattctatgctgattagcttcataaacattgaactttttgattttatagccacaatgctgcatattcatactttaattcctaaagaataatttttaatgttaaaacgtgataatgcaataaatagaaaaatgtggtttacaaaataaaaacggtcttcactagttaccacctg

SEQ ID NO: 10755 - protein, 63 aa, Homo sapiens
MSLRNLWRDYKVLVVMVPLVGLIHLGWYRIKSSPVFQIPKNDDIPEQDSLGLSNLQKSQIQGK

SEQ ID NO: 10756 - DNA, 809 bp, Homo sapiens
gcggcagcagcggctgcttgagatctgtttctggggcctctggcggtggcggcctggggcggcgcgacggctggtgcgcaggctggagtgcaatggcgcgatctcgactcactgtaatgtaacctctgcctcctggattcaagcgattctcctgtttcagcctcccaggtacactgatgctgaagtactatgagccttcggaacttgtggagagactacaaagttttggttgttatggtccctttagttgggctcatacatttggggtggtacagaatcaaaagcagccctgttttccaaatacctaaaaacgacgacattcctgagcaagatagtctgggactttcaaatcttcagaagagccaaatccaggggaagtagcaggcttgcaatcttcaggtaaagaagcagctttgaatctgagcttcatatcgaaagaagagatgaaaaataccagttggattagaaagaactggcttcttgtagctgggatatctttcataggtgtccatcttggaacatactttttgcagaggtctgcaaagcagtctgtaaaatttcagtctcaaagcaaacaaaagagtattgaagagtgaagtaaaataaatatttggaattactaatttgtcattaaatcattctatgctgattagcttcataaacattgaactttttgattttatagccacaatgctgcatattcatactttaattcctaaagaataatttttaatgttaaaacgtgataatgcaataaatagaaaaatgtggtttacaaaataaaaacggtcttcactagttaccacctg

SEQ ID NO: 10757 - protein, 63 aa, Homo sapiens; identical to SEQ ID NO: 10755

SEQ ID NO: 10758 - DNA, 984 bp, Homo sapiens
attgtcaagcgctcaccaaaaggcagaagctgtgccattttgatatgttatttaaattttatgcgttcttttaaaatttcagtttcaacaatttgctggaatatacgctgaataaacttcgctccccgttttttccggtgacggccgctgttggctggagcttcacggaaaacccggagaagcggagtgggggcggcccggcgtcgaccgcagagctgcgcgtgctccgtgccctcgcgcgacgcgaaggttgtcgggatccgcggcagcagcggctgcttgagatctgtttctggggcctctggcggtggcggcctggggcggcgcgacggctggtgcgcaggtacactgatgctgaagtactatgagccttcggaacttgtggagagactacaaagttttggttgttatggtccctttagttgggctcatacatttggggtggtacagaatcaaaagcagccctgttttccaaatacctaaaaacgacgacattcctgagcaagatagtctgggactttcaaatcttcagaagagccaaatccaggggaagtagcaggcttgcaatcttcaggtaaagaagcagctttgaatctgagcttcatatcgaaagaagagatgaaaaataccagttggattagaaagaactggcttcttgtagctgggatatctttcataggtgtccatcttggaacatactttttgcagaggtctgcaaagcagtctgtaaaatttcagtctcaaagcaaacaaaagagtattgaagagtgaagtaaaataaatatttggaattactaatttgtcattaaatcattctatgctgattagcttcataaacattgaactttttgattttatagccacaatgctgcatattcatactttaattcctaaagaataatttttaatgttaaaacgtgataatgcaataaatagaaaaatgtggtttacaaaataaaaacggtcttcactagttaccacctg

SEQ ID NO: 10759 - protein, 63 aa, Homo sapiens; identical to SEQ ID NO: 10755

SEQ ID NO: 10760 - DNA, 692 bp, Homo sapiens
gggaaaacactttaggttgagtgctgagagaaaggctctctgagtaggtgacatctgaactaagagctgaagcagaagaataagccatcctctgtggaccaaaggggacaagattctctacttttctgctacgcactaggaatatagcagagaagacaagtggctgctaccttctgttatcgtgggtggcagtgactagtttttctagatcttgactccctgccgtaactaaagatggagtacactgatgctgaagtactatgagccttcggaacttgtggagagactacaaagttttggttgttatggtccctttagttgggctcatacatttggggtggtacagaatcaaaagcagccctgttttccaaatacctaaaaacgacgacattcctgagcaagatagtctgggactttcaaatcttcagaagagccaaatccaggggaagtagcaggcttgcaatcttcaggtaaagaagcagctttgaatctgagcttcatatcgaaagaagagatgaaaaataccagttggattagaaagaactggcttcttgtagctgggatatctttcataggtgtccatcttggaacatactttttgcagaggtctgcaaagcagtctgtaaaatttcagtctcaaagcaaacaaaagagtattgaagagtgaagtaaaataaatatttggaattact

SEQ ID NO: 10761 - protein, 63 aa, Homo sapiens; identical to SEQ ID NO: 10755

SEQ ID NO: 10762 - DNA, 621 bp, Homo sapiens
gcggcagcagcggctgcttgagatctgtttctggggcctctggcggtggcggcctggggcggcgcgacggctggtgcgcaggctggagtgcaatggcgcgatctcgactcactgtaatgtaacctctgcctcctggattcaagcgattctcctgtttcagcctcccaggtacactgatgctgaagtactatgagccttcggaacttgtggagagactacaaagttttggttgttatggtccctttagttgggctcatacatttggggtggtacagaatcaaaagcagccctgttttccaaatacctaaaaacgacgacattcctgagcaagatagtctgggactttcaaatcttcagaagagccaaatccaggggaagtagcaggcttgcaatcttcaggtaaagaagcagctttgaatctgagcttcatatcgaaagaagagatgaaaaataccagttggattagaaagaactggcttcttgtagctgggatatctttcataggtgtccatcttggaacatactttttgcagaggtctgcaaagcagtctgtaaaatttcagtctcaaagcaaacaaaagagtattgaagagtgaagtaaaataaatatttggaattact

SEQ ID NO: 10763 - protein, 63 aa, Homo sapiens; identical to SEQ ID NO: 10755

SEQ ID NO: 10764 - DNA, 796 bp, Homo sapiens
attgtcaagcgctcaccaaaaggcagaagctgtgccattttgatatgttatttaaattttatgcgttcttttaaaatttcagtttcaacaatttgctggaatatacgctgaataaacttcgctccccgttttttccggtgacggccgctgttggctggagcttcacggaaaacccggagaagcggagtgggggcggcccggcgtcgaccgcagagctgcgcgtgctccgtgccctcgcgcgacgcgaaggttgtcgggatccgcggcagcagcggctgcttgagatctgtttctggggcctctggcggtggcggcctggggcggcgcgacggctggtgcgcaggtacactgatgctgaagtactatgagccttcggaacttgtggagagactacaaagttttggttgttatggtccctttagttgggctcatacatttggggtggtacagaatcaaaagcagccctgttttccaaatacctaaaaacgacgacattcctgagcaagatagtctgggactttcaaatcttcagaagagccaaatccaggggaagtagcaggcttgcaatcttcaggtaaagaagcagctttgaatctgagcttcatatcgaaagaagagatgaaaaataccagttggattagaaagaactggcttcttgtagctgggatatctttcataggtgtccatcttggaacatactttttgcagaggtctgcaaagcagtctgtaaaatttcagtctcaaagcaaacaaaagagtattgaagagtgaagtaaaataaatatttggaattact

SEQ ID NO: 10765 - protein, 63 aa, Homo sapiens; identical to SEQ ID NO: 10755

SEQ ID NO: 10766 - DNA, 334 bp, Homo sapiens
gaccaaaaagaatccgttttacactgtgtccaaaaggccagcagatggcgcccagcaagcccaataggcaaaatgagaacatttgatgtaacattccctgcatccaagttattttaggcctaattttgcaggaagcaattaaaaaaacttgatggctttaactaatactatgctagatagaataatctgatggctagatccagctgtttgggaagttctaggaagcttgcttgcctttttgcccttaaccttacttctactctaaaagattacagtatttataatgaggtagaagcatagcaagttctccctcttctgttcattaatctcttgc

SEQ ID NO: 10767 - protein, 36 aa, Homo sapiens [sequence omitted]

SEQ ID NO: 10768 - DNA, 419 bp, Homo sapiens
gtaagcgcgaaagtgcttcccttaagcttctgaaggttggctgcagttccggctacctgtgtagtccgagtttccacagccaggtactactccgccagtgaccctggacagtaacaaaacatataaagcccgagcccaaaccccgccaccatcataggtctgtagttactgtggaatcaataagccatggcatctaagaaatttgctgttaaagaagtctgtttactgttaaaagaaaccattgattcaagagttcaggagtacttggaagttcgcaaacagcacaggccatcaaatgcagaattcacaagatccaatcccttgtccttaaaaggttgagactattgtgaagagtgctattgtgaacactgtatgttcatgcctaagttcagctttagatactcaagcatttttttcaa

SEQ ID NO: 10769 - protein, 50 aa, Homo sapiens
MASKKFAVKEVCLLLKETIDSRVQEYLEVRKQHRPSNAEFTRSNPLSLKG

SEQ ID NO: 10770 - DNA, 1374 bp, Homo sapiens
gcgaaagtgcttcccttaagcttctgaaggttggctgcagttccggctacctgtgtagtccgagtttccacagccaggtactactccgccagtgaccctggacagtaacaaaacatataaagcccgagcccaaaccccgccaccatcataggtctgtagttactgtggaatcaataagccatggcatctaagaaatttgctgttaaatgtgggaattttgctgtcctcgtggatcttcatatcttgccacaaggttcaaacaaagatacaagctggttttctgaacagaagaaagaggaagtctgtttactgttaaaagaaaccattgattcaagagttcaggagtacttggaagttcgcaaacagcacaggccatcaaatgcagaattcacaagatccaatcccttgtccttaaaaggttatggctttcaaatcacagcctatttcctcaagagagggatacgccttcgctgcatcaggagcacacagaatgctgaactctgtgtattccctgacagatttgtggtttgtgtcagtcagcttgcattcagtcgtgatcttttagcaagtcagaatgaagatttgacagaaagagttctccatggagtgtctgattactttgctgagtgtgcagagagttcacttcctcccagtgcaaagctccggagaaatgctctgaaagaaattgtgaaaagaactgaaacaaaaagcagtgtcacgagcaaatcgcagaccagaagagacactgtggaaacatctagtgactcagtgattgcagagatagcaaggaggaggaatgatggtcaggcttcctccagtcccccatcagaatccatgggacaagcaaaggattccataaaggcagctgagagccactgggggcttcctgttcaaaagctggaaaaagttaatcagacccagccagaagacactagtggccagcaaaaacctcatcctggggagcggttaaagacagggcttctaagcaggagccccgtctgtagctgtgagtcagcatcaccatgtccaaaacaaagtccacgagtggccaaaacccaacagaaacgcaggaactgcagctctgcggaagacttcgaccaccacgggagagtttctcttggaagtgatcgattagtcccgagagaaataatagtggaaaaaagcaaagctgtcagggttttgccagcttcagagttgtcagatccagggttacttttgaaacaagatttggcaaaaaccacgtctaaggaagagttgcatgttttggaaagtctctcctccagacatcttatgaaaaataacccagggcaggcacagcaaaccggcttagccacaaacactgaaagattatctacaattcagaacagcccaacc

SEQ ID NO: 10771 - protein, 397 aa, Homo sapiens
MASKKFAVKCGNFAVLVDLHILPQGSNKDTSWFSEQKKEEVCLLLKETIDSRVQEYLEVRKQHRPSNAEFTRSNPLSLKGYGFQITAYFLKRGIRLRCIRSTQNAELCVFPDRFVVCVSQLAFSRDLLASQNEDLTERVLHGVSDYFAECAESSLPPSAKLRRNALKEIVKRTETKSSVTSKSQTRRDTVETSSDSVIAEIARRRNDGQASSSPPSESMGQAKDSIKAAESHWGLPVQKLEKVNQTQPEDTSGQQKPHPGERLKTGLLSRSPVCSCESASPCPKQSPRVAKTQQKRRNCSSAEDFDHHGRVSLGSDRLVPREIIVEKSKAVRVLPASELSDPGLLLKQDLAKTTSKEELHVLESLSSRHLMKNNPGQAQQTGLATNTERLSTIQNSP

SEQ ID NO: 10772 - DNA, 1407 bp, Homo sapiens; identical to SEQ ID NO: 1658

SEQ ID NO: 10773 - protein, 408 aa, Homo sapiens; identical to SEQ ID NO: 1659

SEQ ID NO: 10774 - DNA, 596 bp, Homo sapiens
cggccaggcgaaactgaaaggcagcacgatgcggttgcggtcgttgccgcggctggccttgaggttgaaggtgttgcccccgatgacaggcgtggaccctgagccgaagctgcagggccccccggccgtgacgcgggactgatactccttgaggcacactttgaagtatgtgtcacactcgtcgcgggtgcacttgcggtctcccgggttccgggcgccgccgcagcagttcccgttctgcagctccccgttcacgttctgcatggacaggatctccaactcgaactgacccgaggccccacacacctgccggcgagggaaggaggttggaccatatattatgggagcaccttttgcaaggatgaaatactccgtctggatggatgggaataattcagctggggatttggaggccctaaagggcagtgtagccaatggacaggtgatcccaggtacctgcatgagtggaggcaggcccttcctgcagacctgcactgaactataacgtgggcatacagggctggcctgagtgatcaatagaatactgtagacgcaacaacatgtggcttctgaggaagcattgtagcctcttggtt

SEQ ID NO: 10775 - protein, 65 aa, Homo sapiens
MCHTRRGCTCGLPGSGRRRSSSRSAAPRSRSAWTGSPTRTDPRPHTPAGEGRRLDHILWEHLLQG

SEQ ID NO: 10776 - DNA, 499 bp, Homo sapiens
atgctcaacatgctttgactgttgaaaagagacctttggcacacattgaagggatggtgatggagatgccaatccatggaatcaggtggcacagctatgttggtagctatagcagaagtcttcttggcaaagattcctccagggaaggaaggtaccattggagaaccatgcatgaagacagggaagaaatgattggaatcatgaaacattaaactggaaggaagccctaggcaaacctaactcatgggaaaacagacacccacatgttacccagtttagtaccaaaaccaaggctggtatttgcataaatatacttttcttctctatctaatatcaaggccttcttagtattgttaataggccttaagcttggtttgtctacatagaaatcaaaataacaatgtcaacccatgaaagaattaaaagaagtcccaaacagttctgatttcctccaatgtgactatttctgatatattataaaataacagaaatcaaactc

SEQ ID NO: 10777 - protein, 52 aa, Homo sapiens
MVMEMPIHGIRWHSYVGSYSRSLLGKDSSREGRYHWRTMHEDREEMIGIMKH

SEQ ID NO: 10778 - DNA, 727 bp, Homo sapiens
aagcagacctcaggcggtaatgctgactggcccgaagctcacctcctgctgtgttgcccggttcctaacaggccatggacctgcaccagtctgtggcccgaaggctggggacccctgattcctacacgaagaaacctcaaacccaggattcaagccaaaaacaatgattctcaagttcctatgaaatcctggatggatgttgaactgggcaacgtactagctgactcccgtggcagatgcgagcctcaacaaagctccagggctggcacttcaagggagcggaggtgtgtgtttgagtctgagtcacatgcagtaggccatctgctcttatcaacaggatgagaatctttgccaagaagacttctgctatagctaccaacatagctgtgccacctgattccatggattggcatctccatcacctaatgaagcagagataacacggaggacctcagtcaatactatctacaaacctcagttgatatcatttgcaaacctccctgattcagtattaacattcacaatatttaattaggcaccattgaatttcatttaccaaatgtcaagcagatgacaaaattctcccaatttgataaaatttgataaattttaatgttgacattaagtcacttttattttagaaaacagcaagacatcttagattttgaaaacggaaaagtcaatatcaccaaagtctgtttgttggtataagataaaaaattgagtt

SEQ ID NO: 10779 - protein, 33 aa, Homo sapiens
MRIFAKKTSAIATNIAVPPDSMDWHLHHLMKQR

SEQ ID NO: 10780 - DNA, 1903 bp, Homo sapiens
acagatgacacactaaggcgcaaggcagctgcacatccacggccagcctcgttgtcttcagggatttgttcaaagttcattctgaattgtaaggtaaccactgcagaacacgagcctttcctgggtatgtgtggttatttctgcccttcacggtcccactcaagtcctgcctccctcagggagacctcccagacctcaccaagccgtgggcacgtggaccagaagccgtggaccccagaggctcatttagggatctgctttctgaacccaggtcctaacatctgcactgcagcgagcatttctggtgcctcaagtgagtcactccaacttccagctcactgagaggcgatggagcactgagtgccagcatcttccagcaccagaggagctgactctgaatagacagctcggcagcggcctcagcacagagcaggggagccaccagccacaggcagccactgagcccttggcatgtaacccggtaacccatgcaacagaagacctgagcgtccagtgttgctagcttgaagtaacttcagtggtgttccccagcgtttttctcatccccctcccttcccttcccctacagctttcttcctctttcccctccttctgagtctttcgtccccagtcctgggaaccttttttctgacttggtgttttctcctgaatgcctccttcctggccccctaatcagaaatgcagaagccacctgccccacacagggggccactttccctgcatctggcactcaccaggacagtcatagaactggccttgggtgcttggggagagtggagaggtctggggggcatccactggcctcagcctcagagcttctcatcagtaacccaggaggcaaaggcccagctcaagattagcccaggccactgtatctgtgccaagacctacagctgtccctgcagggcgtgcatctctgcagcccaggctatcacaatggtgtcccttttggtggggatgtgaggcctgctgctgcctgggaagaagctgacaggattgttggtgctgtggggagaagctggtgtaactgagacccatgagggaggccctttgtgggtctgtggctgggaggagctctggggaagatgggccttgagaaatcccagcttagcacctttgacagttgctccactgagtcaccctagactgcaatctcacagatgttctaaccaccctctccctggggagcccttgggggtgctgcaagcccagtcctcactcactggctttgtgcttctcttcccgacttcctttttttgctcctgttgagaaatgtgggtccagggctgcgtgctccagtgtgcggaaggaagggcagcgtgctctttggactgagctggctcaagggaagctgggtctgaggggagactgacctcgacccttcttaaatgaaacaccttttccctgcgtctcagtcaccgttacctggcctgatcactgtgtgccacaccccatcacatccatccccacaagaatgccaggaggaggggtcattggcctttttgtcagcacaaacctctggaggcccagctcccaagacccgccaggcacacctgccagagtgccttaacttgggatgtctgcaaacctctgtccatggccgaacccaccccactgcctgttactgtaaataaaggtctattagcatgccaccatgcccctcctccgatgcatacagtgcccagctcagcacctggtgcaagtaagcacaatctggcttccagccatcactgctgttgctactaacacaaatattaggccccttctagaatgcaaagataacccagggctgctcgttctgtgtccagatcacagagtttttctttttatccttatcaactttattgagggataatttacaggcaataaatcatatccattt

SEQ ID NO: 10781 - protein, 71 aa, Homo sapiens
MCGYFCPSRSHSSPASLRETSQTSPSRGHVDQKPWTPEAHLGICFLNPGPNICTAASISGASSESLQLPAH

SEQ ID NO: 10782 - DNA, 787 bp, Homo sapiens
ctgggctccctgcctcgggctctcaccctcctctcctgcagctccagctttgtgctctgcctctgaggagaccatggcccagtatctgagtaccctgctgctcctgctggccaccctagctgtggccctggcctggagccccaaggaggaggataggataatcccgggtggcatctataacgcagacctcaatgatgagtgggtacagcgtgcccttcacttcgccatcagcgagtataacaaggccaccaaagatgactactacagacgtccgctgcgggtactaagagccaggcaacagaccgttgggggggtgaattacttcttcgacgtagaggtgggccgcaccatatgtaccaagtcccagcccaacttggacacctgtgccttccatgaacagccagaactgcagaagaaacagttgtgctctttcgagatctacgaagttccctgggagaacagaaggtccctggtgaaatccaggtgtcaagaatcctagggatctgtgccaggccattcgcaccagccaccacccactcccaccccctgtagtgctcccacccctggactggtggcccccaccctgcgggaggcctccccatgtgcctgcgccaagagacagacagagaaggctgcaggagtcctttgttgctcagcagggcgctctgccctccctccttccttcttgcttctaatagccctggtacatggtacacacccccccacctcctgcaattaaacagtagcatcgcctccctctgagttcttggctgtctggggatgtgca

SEQ ID NO: 10783 - protein, 141 aa, Homo sapiens; identical to SEQ ID NO: 1662

SEQ ID NO: 10784 - DNA, 761 bp, Homo sapiens
ctgggctccctgcctcgggctctcaccctcctctcctgcagctccagctttgtgctctgcctctgaggagaccatggcccagtatctgagtaccctgctgctcctgctggccaccctagctgtggccctggcctggagccccaaggaggaggataggataatcccgggtggcatctataacgcagacctcaatgatgagtgggtacagcgtgcccttcacttcgccatcagcgagtataacaaggccaccaaagatgactactacagacgtccgctgcgggtactaagagccaggcaacagaccgttgggggggtgaattacttcttcgacgtagaggtgggccgcaccatatgtaccaagtcccagcccaacttggacacctgtgccttccatgaacagccagaactgcagaagaaacagttgtgctctttcgagatctacgaagttccctgggagaacagaaggtccctggtgaaatccaggtgtcaagaatcctagggatctgtgccaggccattcgcaccagccaccacccactcccaccccctgtagtgctcccacccctggactggtggcccccaccctgcgggaggcctccccatgtgcctgcgccaagagacagacagagaaggctgcaggagtcctttgttgctcagcagggcgctctgccctccctccttccttcttgcttctaatagccctggtacatggtacacacccccccacctcctgcaattaaacagtagcatcgcctccctctg

SEQ ID NO: 10785 - protein, 141 aa, Homo sapiens; identical to SEQ ID NO: 1662

SEQ ID NO: 10786 - DNA, 696 bp, Homo sapiens
ctgggctccctgcctcgggctctcaccctcctctcctgcagctccagctttgtgctctgcctctgaggagaccatggcccagtatctgagtaccctgctgctcctgctggccaccctagctgtggccctggcctggagccccaaggaggaggataggataatcccgggtggcatctataacgcagacctcaatgatgagtgggtacagcgtgcccttcacttcgccatcagcgagtataacaaggccaccaaagatgactactacagacgtccgctgcgggtactaagagccatatgtaccaagtcccagcccaacttggacacctgtgccttccatgaacagccagaactgcagaagaaacagttgtgctctttcgagatctacgaagttccctgggagaacagaaggtccctggtgaaatccaggtgtcaagaatcctagggatctgtgccaggccattcgcaccagccaccacccactcccaccccctgtagtgctcccacccctggactggtggcccccaccctgcgggaggcctccccatgtgcctgcgccaagagacagacagagaaggctgcaggagtcctttgttgctcagcagggcgctctgccctccctccttccttcttgcttctaatagccctggtacatggtacacacccccccacctcctgcaattaaacagtagcatcgcc

SEQ ID NO: 10787 - protein, 122 aa, Homo sapiens
MAQYLSTLLLLLATLAVALAWSPKEEDRIIPGGIYNADLNDEWVQRALHFAISEYNKATKDDYYRRPLRVLRAICTKSQPNLDTCAFHEQPELQKKQLCSFEIYEVPWENRRSLVKSRCQES

SEQ ID NO: 10788 - DNA, 463 bp, Homo sapiens
ctgggctccctgcctcgggctctcaccctcctctcctgcagctccagctttgtgctctgcctctgaggagaccatggcccagtatctgagtaccctgctgctcctgctggccaccctagctgtggccctggcctggagccccaaggaggaggataggataatcccgggtggcatctataacgcagacctcaatgatgagtgggtacagcgtgcccttcacttcgccatcagcgagtataacaaggccaccaaagatgactactacagacgtccgctgcgggtactaagagccaggcaacagaccgttgggggggtgaattacttcttcgacgtagaggtgggccgcaccatatgtaccaagtcccagcccaacttggacacctgtgccttccttcttgcttctaatagccctggtacatggtacacacccccccacctcctgcaattaaacagtagcatcgcc

SEQ ID NO: 10789 - protein, 129 aa, Homo sapiens
MAQYLSTLLLLLATLAVALAWSPKEEDRIIPGGIYNADLNDEWVQRALHFAISEYNKATKDDYYRRPLRVLRARQQTVGGVNYFFDVEVGRTICTKSQPNLDTCAFLLASNSPGTWYTPPHLLQLNSSI

SEQ ID NO: 10790 - DNA, 370 bp, Homo sapiens
ggaagtcacatagctttcacagtcaaaggaccagtgtcacctctgtggagacctgggtgactcaagcttgggagcactggggaagagaggcatggctcggggaggctgcactccagctttgtgctctgcctctgaggagaccatggcccagtatctgagtaccctgctgctcctgctggccaccctagctgtggccctggcctggagccccaaggaggaggataggataatcccgggtggcatctataacgcagacctcaatgatgagtgggtacagcgtgcccttcacttcgccatcagcgagtataacaaggccaccaaagatgactactacagacgtccgctgcgggtactaagagccaggcaacag

SEQ ID NO: 10791 - protein, 92 aa, Homo sapiens
MARGGCTPALCSASEETMAQYLSTLLLLLATLAVALAWSPKEEDRIIPGGIYNADLNDEWVQRALHFAISEYNKATKDDYYRRPLRVLRARQ

SEQ ID NO: 10792 - DNA, 129 bp, Homo sapiens
caccatttccagataagagaaatgcgactgagaaagattaagatattttcttaagattggacattatgttcctacccactgtgcttgccttatagatggcatttaaaaatgtatttatttaaaactaat

SEQ ID NO: 10793 - DNA, 750 bp, Homo sapiens
gggatccccgcctcaggctctcaacctcctctcctgcagctccagctctgtgctctgcctccgaggagaccatggcctggcccctgtgcaccctgctgctcctgctggccacccaggctgtggccctggcctggagcccccaggaggaggacaggataatcgagggtggcatctatgatgcagacctcaatgatgagcgggtacagcgtgcccttcactttgtcatcagcgagtataacaaggccactgaagatgagtactacagacgcctgctgcgggtgctacgagccagggagcagatcgtgggcggggtgaattacttcttcgacatagaggtgggccgaaccatatgtaccaagtcccagcccaacttggacacctgtgccttccatgaacagccagaactgcagaagaaacagttgtgctctttccagatctacgaagttccctgggaggacagaatgtccctggtgaattccaggtgtcaagaagcctagggatctgtgccagggagtcacactgaccacctcctactcccaccccttgtagtgctcccacccctggactggtggcccccaccctgtgggaggtctccccatgcacctgcagcaggagaagacagagaaggctgcaggaggcctttgttgctcagcaggggactctgccctccctccttccttttgcttctcatagccctggtacatggtacacacacccccacctcctgcaattaaacagtagcatcacctc

SEQ ID NO: 10794 - protein, 141 aa, Homo sapiens; identical to SEQ ID NO: 1664

SEQ ID NO: 10795 - DNA, 538 bp, Homo sapiens
gatccccgcctcaggctctcaacctcctctcctgcagctccagctctgtgctctgcctccgaggagaccatggcctggcccctgtgcaccctgctgctcctgctggccacccaggctgtggccctggcctggagcccccaggaggaggacaggataatcgagggtggcatctatgatgcagacctcaatgatgagcgggtacagcgtgcccttcactttgtcatcagcgagtataacaaggccactgaagatgagtactacagacgcctgctgcgggtgctacgagccagggagcagatcgtgggcggggtgaattacttcttcgacatagaggtgggccgaaccatatgtaccaagtcccagcccaacttggacacctgtgccttccatgaacagccagaactgcagaagacagagaaggctgcaggaggcctttgttgctcagcaggggactctgccctccctccttccttttgcttctcatagccctggtacatggtacacacacccccacctcctgcaattaaacagtagcatc

SEQ ID NO: 10796 - protein, 138 aa, Homo sapiens
MAWPLCTLLLLLATQAVALAWSPQEEDRIIEGGIYDADLNDERVQRALHFVISEYNKATEDEYYRRLLRVLRAREQIVGGVNYFFDIEVGRTICTKSQPNLDTCAFHEQPELQKTEKAAGGLCCSAGDSALPPSFCFS

SEQ ID NO: 10797 - DNA, 1734 bp, Homo sapiens
agggatctattttggagacaacaaacttgactaaggaatctcaagaagaaaatataattctgctgccaggccccaatggagcaaatagagctcgggacccaggggcctttggaaggaacaggaatgcggttagaggagtgcaggaaggggctcttgggatgtgccacccaggaagacagagggccagtgctgctacctgcagccacacgactccacgaccatgtcctcatactgcttatacaccacgttgttggcagagtcaatgaagaggatgctgatgggactcagccgcgtgggcacacagcaggtgggtggtgtggactcggggtccatggagttcatcagggtctggatgactgcatgattcgtgggctccaggtgggagcgcaatgggaactcgcacagcccctcgcagtggaaagcctcgtactcaaggggtgcgatgatccagtcgtcccagcccatgtccttgaagttgacatgcagtgccttccgactgcagcgagccttaaggttcttgctgggtcgcttgccctggcgagtggccagtggggcccgccgttttcgccgctggctgaacaggtactcatacacggtcttatcgtcctggccagagcgggccttaatctcattaaagaacaggtcccgtttcttggtgcggccaaacaccaggaacagggccttctcgtggacctgccgggcggcgcggtcgaagcccaggccacggaggtccacggccctgccccgttcccaggcctccagctccaggcacagctgggccgagttcttaaagtttcggaagagcttccagatgtcgaacacctcccagccagatccgtccaggcctggcacggagcgcacatccagcaaggaggccggctgccggccgctggggcagctggacagcttcagctgggcagcccgcccgcctccgggggccgctggcttggccgtgtccgagggcttcttccgcaagatccgcagctcggcccccagcagcccatccttctccagggcactaatgtcaaacacgtacctctgcttcctgaccacgggacctcggtcatctagagagaacacccagaagtcattccctgcaacctcaccaagggagccagtcacttcgaggctgcgggggaaggccccagctctctccccgtccagagagctttctttcacctctgccccattctgacagaagccaagagccaaaccactgagagcctttttgaaaatgagagcatttcctacatagccgaccaagtaggggtgttcacctgaagatgtggctggggatgatttgcgtgattctggtgtttgtgtcatgatatacgtgttatcagagatttatcagctttgtaactgccttctacctatctctctcccagccatgagctaacgtgatgtctcatttgtgagataggtggagtgagcattaaaattactcctgttgactgggcacagtggctcacacctgcaatcccagcactttgggaggctgaggtgggtggattgcttgagctccggagttcgaaaccagcctgcacaacatggtgacactctgtctctacaaaaaatacaaaaattaaccaggcatggtggcgtgcacatgtagtcccagctactcaggaggctgaggtgggaggattgattgaccccagggaggtcaaggcttcagtgagccgtgaattcgctattgcactccggcctgggcaacagagaaagaccctggct

SEQ ID NO: 10798 - protein, 331 aa, Homo sapiens [sequence omitted]

SEQ ID NO: 10799 - DNA, 2613 bp, Homo sapiens
ttggaattccgtttccaattcctgagttcaggtttgtaaaagatttttctgagcacctgcaggcctgtgagtgtgtgtgtgtgtgtgtgtgtgtgtgtgtgtgtgtgtgtgtgtgaagtattttcactggaaaggattcaaaactagggggaaaaaaaaactggagcacacaggcagcattacgccattcttccttcttggaaaaatccctcagccttatacaagcctccttcaagccctcagtcagttgtgcaggagaaagggggcggttggctttctcctttcaagaacgagttattttcagctgctgactggagacggtgcacgtctggatacgagagcatttccactatgggactggatacaaacacacacccggcagacttcaagagtctcagactgaggagaaagcctttccttctgctgctactgctgctgccgctgcttttgaaagtccactcctttcatggtttttcctgccaaaccagaggcacctttgctgctgccgctgttctctttggtgtcattcagcggctggccagaggatgagactccccaaactcctcactttcttgctttggtacctggcttggctggacctggaattcatctgcactgtgttgggtgcccctgacttgggccagagaccccaggggaccaggccaggattggccaaagcagaggccaaggagaggccccccctggcccggaacgtcttcaggccagggggtcacagctatggtgggggggccaccaatgccaatgccagggcaaagggaggcaccgggcagacaggaggcctgacacagcccaagaaggatgaacccaaaaagctgccccccagaccgggcggccctgaacccaagccaggacaccctccccaaacaaggcaggctacagcccggactgtgaccccaaaaggacagcttcccggaggcaaggcacccccaaaagcaggatctgtccccagctccttcctgctgaagaaggccagggagcccgggcccccacgagagcccaaggagccgtttcgcccaccccccatcacaccccacgagtacatgctctcgctgtacaggacgctgtccgatgctgacagaaagggaggcaacagcagcgtgaagttggaggctggcctggccaacaccatcaccagctttattgacaaagggcaagatgaccgaggtcccgtggtcaggaagcagaggtacgtgtttgacattagtgccctggagaaggatgggctgctgggggccgagctgcggatcttgcggaagaagccctcggacacggccaagccagcggcccccggaggcgggcgggctgcccagctgaagctgtccagctgccccagcggccggcagccggcctccttgctggatgtgcgctccgtgccaggcctggacggatctggctgggaggtgttcgacatctggaagctcttccgaaactttaagaactcggcccagctgtgcctggagctggaggcctgggaacggggcagggccgtggacctccgtggcctgggcttcgaccgcgccgcccggcaggtccacgagaaggccctgttcctggtgtttggccgcaccaagaaacgggacctgttctttaatgagattaaggcccgctctggccaggacgataagaccgtgtatgagtacctgttcagccagcggcgaaaacggcgggccccactggccactcgccagggcaagcgacccagcaagaaccttaaggctcgctgcagtcggaaggcactgcatgtcaacttcaaggacatgggctgggacgactggatcatcgcaccccttgagtacgaggctttccactgcgaggggctgtgcgagttcccattgcgctcccacctggagcccacgaatcatgcagtcatccagaccctgatgaactccatggaccccgagtccacaccacccacctgctgtgtgcccacgcggctgagtcccatcagcatcctcttcattgactctgccaacaacgtggtgtataagcagtatgaggacatggtcgtggagtcgtgtggctgcaggtagcagcactggccctctgtcttcctgggtggcacatcccaagagccccttcctgcactcctggaatcacagaggggtcaggaagctgtggcaggagcatctacacagcttgggtgaaaggggattccaataagcttgctcgctctctgagtgtgacttgggctaaaggcccccttttatccacaagttcccctggctgaggattgctgcccgtctgctgatgtgaccagtggcaggcacaggtccagggagacagactctgaatgggactgagtcccaggaaacagtgctttccgatgagactcagcccaccatttctcctcacctgggccttctcagcctctggactctcctaagcacctctcaggagagccacaggtgccactgcctcctcaaatcacatttgtgcctggtgacttcctgtccctgggacagttgagaagctgactgggcaagagtgggagagaagaggagagggcttggatagagttgaggagtgtgaggctgttagactgttagatttaaatgtatattgatgagataaaaagcaaaactgtgcctaaaa

SEQ ID NO: 10800 - protein, 501 aa, Homo sapiens; identical to SEQ ID NO: 1666

SEQ ID NO: 10801 - DNA, 2418 bp, Homo sapiens
cgctgccactggttagcgataatactggcagcgcgaccggtttctgagggttgttcaccttgctgctcagacgctccgagaagcttcaggcagcataacacttacagagctgctgactggagacggtgcacgtctggatacgagagcatttccactatgggactggatacaaacacacacccggcagacttcaagagtctcagactgaggagaaagcctttccttctgctgctactgctgctgccgctgcttttgaaagtccactcctttcatggtttttcctgccaaaccagaggcacctttgctgctgccgctgttctctttggtgtcattcagcggctggccagaggatgagactccccaaactcctcactttcttgctttggtacctggcttggctggacctggaattcatctgcactgtgttgggtgcccctgacttgggccagagaccccaggggaccaggccaggattggccaaagcagaggccaaggagaggccccccctggcccggaacgtcttcaggccagggggtcacagctatggtgggggggccaccaatgccaatgccagggcaaagggaggcaccgggcagacaggaggcctgacacagcccaagaaggatgaacccaaaaagctgccccccagaccgggcggccctgaacccaagccaggacaccctccccaaacaaggcaggctacagcccggactgtgaccccaaaaggacagcttcccggaggcaaggcacccccaaaagcaggatctgtccccagctccttcctgctgaagaaggccagggagcccgggcccccacgagagcccaaggagccgtttcgcccaccccccatcacaccccacgagtacatgctctcgctgtacaggacgctgtccgatgctgacagaaagggaggcaacagcagcgtgaagttggaggctggcctggccaacaccatcaccagctttattgacaaagggcaagatgaccgaggtcccgtggtcaggaagcagaggtacgtgtttgacattagtgccctggagaaggatgggctgctgggggccgagctgcggatcttgcggaagaagccctcggacacggccaagccagcggcccccggaggcgggcgggctgcccagctgaagctgtccagctgccccagcggccggcagccggcctccttgctggatgtgcgctccgtgccaggcctggacggatctggctgggaggtgttcgacatctggaagctcttccgaaactttaagaactcggcccagctgtgcctggagctggaggcctgggaacggggcagggccgtggacctccgtggcctgggcttcgaccgcgccgcccggcaggtccacgagaaggccctgttcctggtgtttggccgcaccaagaaacgggacctgttctttaatgagattaaggcccgctctggccaggacgataagaccgtgtatgagtacctgttcagccagcggcgaaaacggcgggccccactggccactcgccagggcaagcgacccagcaagaaccttaaggctcgctgcagtcggaaggcactgcatgtcaacttcaaggacatgggctgggacgactggatcatcgcaccccttgagtacgaggctttccactgcgaggggctgtgcgagttcccattgcgctcccacctggagcccacgaatcatgcagtcatccagaccctgatgaactccatggaccccgagtccacaccacccacctgctgtgtgcccacgcggctgagtcccatcagcatcctcttcattgactctgccaacaacgtggtgtataagcagtatgaggacatggtcgtggagtcgtgtggctgcaggtagcagcactggccctctgtcttcctgggtggcacatcccaagagccccttcctgcactcctggaatcacagaggggtcaggaagctgtggcaggagcatctacacagcttgggtgaaaggggattccaataagcttgctcgctctctgagtgtgacttgggctaaaggcccccttttatccacaagttcccctggctgaggattgctgcccgtctgctgatgtgaccagtggcaggcacaggtccagggagacagactctgaatgggactgagtcccaggaaacagtgctttccgatgagactcagcccaccatttctcctcacctgggccttctcagcctctggactctcctaagcacctctcaggagagccacaggtgccactgcctcctcaaatcacatttgtgcctggtgacttcctgtccctgggacagttgagaagctgactgggcaagagtgggagagaagaggagagggcttggatagagttgaggagtgtgaggctgttagactgttagatttaaatgtatattgatgagataaaaagcaaaactgtgcctaaaa

SEQ ID NO: 10802 - protein, 501 aa, Homo sapiens; identical to SEQ ID NO: 1666

SEQ ID NO: 10803 - DNA, 684 bp, Homo sapiens
gaaagggggcggttggctttctcctttcaagaacgagttattttcagctgctgactggagacggtgcacgtctggatacgagagcatttccactatgggactggatacaaacacacacccggcagacttcaagagtctcagactgaggagaaagcctttccttctgctgctactgctgctgccgctgcttttgaaagtccactcctttcatggtttttcctgccaaaccagaggcacctttgctgctgccgctgttctctttggtgtcattcagcggctggccagaggatgagactccccaaactcctcactttcttgctttggtacctggcttggctggacctggaattcatctgcactgtgttgggtgcccctgacttgggccagagaccccaggggaccaggccaggattggccaaagcagaggccaaggagaggccccccctggcccggaacgtcttcaggccagggggtcacagctatggtgggggggccaccaatgtgccactgcctcctcaaatcacatttgtgcctggtgacttcctgtccctgggacagttgagaagctgactgggcaagagtgggagagaagaggagagggcttggatagagttgaggagtgtgaggctgttagactgttagatttaaatgtatattgatgagataaaaagcaaaactgtgcct

SEQ ID NO: 10804 - protein, 93 aa, Homo sapiens
MRLPKLLTFLLWYLAWLDLEFICTVLGAPDLGQRPQGTRPGLAKAEAKERPPLARNVFRPGGHSYGGGATNVPLPPQITFVPGDFLSLGQLRS

SEQ ID NO: 10805 - DNA, 8416 bp, Homo sapiens
agtttggggggcggggcctggccctctgcctcggggtgggctccgcccccgtcccccgcagggccttagcagcggctgccgcagctcaatcgcggagcaactagccgggcgtctgcgggagccgagcgtggtgaggtggggcctcaggggcaggtgggaggtgctcgggttaaccgtccgaggcccggagacccgcccgtctagggcgcctgagggaatcccgttcgggcagcggcctcttgttacccgggaggaacccgaggcccagagaggggctgggacgcgtcgttagggcccggggcccgcttgcctcagcttcttgctgccgccagcacgctaagctccagtcggcgccgaaggagagcttcccgaccctcgtgtccagtagccgcaatcccaggctgggagggtgaggcgccgcgctctgccgcccccccgcccctcgctccctgtgtcctggcggatttgcacgtaatctatccgaaagcccagtcccacccgccacccgactctggagctcccattcttcaggaccctgctgaagtatcgcttctcagccgccttctccaggcgcagctgcattcgcttctcggtttttgcactcgctgtgcaccgagttactttcccggcccctcgttgacaccgttcacaggtggctgttggtctttagtaagggtgaggtagagttgttggcagaaatcctgggataagagaatagtttcctggaagatctgtgcctccaaccagcagagagggattgagcttcattgaactcaacagagccaacatttcatagcaccatgttcaagaggaggttgaagtggcatggcaatggttagagaccctgctgggcgtgaacaccctctggctacctagggacctgtgggcctaccacctggtgccctcatggagacaagaagccctgggttgaacaacatgaagccccagtcactgcagctggtactggaagagcaggtgctggcactacagcagcagatggcagagaatcaggcagcctcctggcggaagctgaagaactcccaggaggcccagcagagacaagcaacccttgtgaggaagctgcaggccaaggtgctgcagtaccgaagctggtgccaagagctggagaagcggctagaagccactggaggaccaatcccccagaggtgggaaaatgtggaggagccaaacctggatgagctgctggtccgattggaggaggagcaacagaggtgtgagagtctagcagaggtgaacacccagcttcgactgcacatggaaaaagctgacgtggtgaataaagcccttagggaagatgtggaaaaactgacagtggactggagccgggcccgggatgagctaatgaggaaggagagccagtggcagatggagcaggagttcttcaagggctacctgaaaggggagcacggtcgccttctcagtctatggcgggaggttgtgacattccgacgccacttcctggaaatgaagtcagctactgacagagatctgatggagctaaaagctgagcatgtgaggctttcagggtctctgttgacctgttgtctgcgcttgactgtgggagcacagtctcgggaacccaacggatctggaagaatggatgggcgggagccggcccagctgctgctgctactagccaagacccaggagctggagaaggaagcccatgaaaggagccaggagttaatacagctgaagagtcaaggggatctggagaaggctgaacttcaggaccgggtgaccgagctctctgctctgttgacccagtctcagaagcaaaatgaagattatgaaaagatgataaaggctctgagagagacagtggagatcctggagacaaatcacacagaattaatggaacatgaagcatctcttagtaggaatgcgcaagaggagaagttgtctttacagcaggtgatcaaggatataacccaggtcatggtggaagaaggggacaatatagcccaaggctctggtcatgagaactctttggaattggactctagtatcttctcccagtttgattaccaggatgcagacaaggctcttactctggtgcgttcagtgctgactcggagacgccaggctgtgcaggacctaaggcagcagcttgcaggctgtcaagaggctgtgaacttgttgcaacagcagcatgatcagtgggaggaagagggcaaagccttgagacagcggctgcagaagctcactggggagcgggacactctggcagggcagactgtggacctccagggagaggtggactctctcagcaaggagcgagagctgctgcagaaggccagggaagagctgcggcagcagctggaggtgctagagcaggaggcatggcgcctgcgaagggtaaatgtggagcttcagctgcagggggactctgcccagggccagaaggaggaacagcaggaggagctgcacctggctgtccgggagagggagcgtcttcaggagatgctgatgggcctggaagccaaacagtcagaatcactcagtgaactgatcactcttcgggaagccctggagtcaagtcacctggaaggggagttactgaggcaagagcaaacggaagtgaccgcagcgctggctagggcagagcagtcaattgcagagctgtcgagttctgaaaacaccctgaagacagaagtagctgatcttcgggctgcagctgtcaagctcagtgccttaaatgaggctttggcgttagataaagttgggctgaaccagcagcttctccagttagaggaggagaaccagtctgtgtgcagcagaatggaggccgcagagcaggcgagaaatgctttgcaggtcgacctggcggaggcagagaagaggagggaagccctgtgggaaaagaacactcacctggaggctcagctgcagaaagctgaggaggctggggctgagctgcaggcagatctcagggacatccaagaagagaaggaagaaattcaaaagaaactaagtgagtcacgtcaccagcaggaggcagccacgactcagctggagcagctacatcaggaggcaaagcgacaggaagaagtgcttgccagggcagtccaggagaaggaggccctagtacgagagaaagcggctctagaggtgcggctgcaggccgtggagcgtgaccggcaggacctcgctgaacaactacaggggctcagctcagccaaggagctactggagagcagtctgtttgaagcccaacaacaaaattctgtgatagaggtcaccaaggggcagctggaggtccagattcaaactgtcactcaagccaaggaagtaatccaaggggaagtgaggtgcctgaagctggaactggacactgaacggagtcaggcagagcaggagcgggatgctgcagccagacagctggcccaggctgagcaagaagggaagactgccttggagcagcagaaggcagcccatgagaaagaggtgaaccagctccgggagaaatggatgcagctggaaacagagaaggagagagtatccctcctggagacactgctgcagacgcagaaggagctagcagatgccagccaacaactggaacgactgaggcaggacatgaaagtccagaaattaaaggagcaggagaccactgggatactacagacccagctccaggaggctcaacgggagctgaaggaggcagcccggcagcacagagatgaccttgctgccctccaagaagagagcagctccctgctgcaggataagatggacctgcagaagcaggtggaggacttgaagtctcagctggtggcccaggatgactcccagaggctggtggagcaggaggttcaggagaagctgagagagacccaggagtataaccgaattcagaaggagctggagagagagaaagccagcctgactctgtcactgatggaaaaggaacagagactccttgttttacaagaagctgactctattcgacaacaagagctgagtgccctgcgccaggacatgcaggaggcccagggagaacagaaagagctcagtgctcagatggaattactaaggcaagaggtgaaggaaaaggaggctgactttctggcccaggaagcacagctgctggaggagctggaggcgtctcatatcacggagcagcagctgcgagcctccttgtgggcccaggaagccaaggcagcccaactacagctgcgactgcgcagcacagagagccagctagaagcgctggccgcagagcagcagcccgggaaccaggcccaggcccaggcccagctggccagcctctactctgccctgcagcaggccctggggtctgtttgtgagagcaggcctgagctgagtggtgggggagactctgctccttccgtctggggccttgagccagaccagaatggagctaggagcctctttaagagagggcccctgctgactgctctctccgctgaggcagtagcatctgccctccacaagcttcatcaagacctgtggaagactcaacagacccgggatgttctgagggatcaggtccagaaactggaagagcgtctaactgatactgaggctgagaagagccaggtccacacagagttgcaggatctgcagagacagctctcccagaatcaggaagagaaatccaagtgggaaggaaagcagaactccctagaatctgagctgatggaactacatgaaactatggcatccttacagagtcgcctgcggagagcagagctacagcgaatggaagcccagggtgagcgagagttacttcaggcagccaaggagaacctgacagcccaggtggaacacctgcaagcagctgtcgtagaagccagggctcaggcaagtgctgctggcatcctggaagaagacctgagaacggctcgctcagcactgaagctgaaaaatgaggaagtagagagtgagcgtgagagagcccaggctctgcaagagcagggcgaactgaaggtggcccaagggaaggctctgcaagagaatttggccctcctgacccagaccctagctgaaagagaagaggaggtggagactctgcggggacaaatccaggaactggagaagcaacgggaaatgcagaaggctgctttggaattgctgtctctggacctgaagaagaggaaccaagaggtagatctgcagcaagaacagattcaggagctagagaagtgtaggtctgttttagagcatctgcccatggccgtccaggagcgagagcagaagctgactgtgcagagggagcagatcagagagctcgagaaggatcgggagactcagaggaacgtcttggagcatcagcttctagaacttgagaagaaagaccaaatgattgagtcccagagaggacaggttcaggacctgaaaaagcagttggttactctggaatgcctggccctggaactggaggaaaaccatcacaagatggagtgccagcaaaaactgatcaaggagctggagggccagagggaaacccagagagtggctttgacccaccttacgctggacctagaagaaaggagccaggagctgcaggcacaaagcagccagatccatgacctggagagccacagcaccgttctggcaagagagctgcaggagagggaccaggaggtgaagtctcagcgagaacagatcgaggagctgcagaggcagaaagagcatctgactcaggatctcgagaggagagaccaggagctgatgctgcagaaggagaggattcaggttctcgaggatcagaggacccggcagaccaagatcctggaggaggacctggaacagatcaagctgtccttgagagagcgaggccgggagctgaccactcagaggcagctgatgcaggaacgggcagaggaagggaagggcccaagtaaagcacagcgcgggagcctagagcacatgaagctgatcctgcgtgataaggagaaggaggtggaatgtcagcaggagcatatccatgaactccaggagctcaaagaccagctggagcagcagctccagggcctgcacaggaaggtaggtgagaccagcctcctcctgtcccagcgagagcaggaaatagtggtcctgcagcagcaactgcaggaagccagggaacaaggggagctgaaggagcagtcacttcagagtcaactggatgaggcccagagagccctagcccagagggaccaggaactggaggctctgcagcaagaacagcagcaggcccagggacaggaggagagggtgaaggaaaaggcagacgccctccagggagctctggagcaagcccatatgacactgaaggagcgtcatggagagcttcaggaccacaaggaacaggcacgaaggctggaggaagagctggcagtggagggacggcgggtccaggccctggaggaggtgctgggagacctaagggctgagtctcgggaacaggagaaagctctgttggccctccagcagcagtgtgctgagcaggcacaggagcatgaggtggagaccagggccctgcaggacagctggctgcaggcccaggcagtgctcaaggaacgggaccaggagctggaagctctgcgggcagaaagtcagtcctcccggcatcaggaggaggctgcccgggcccgggctgaggctctgcaggaggcccttggcaaggctcatgctgccctgcaggggaaagagcagcatctcctcgagcaggcagaattgagccgcagtctggaggccagcactgcaaccctgcaagcctccctggatgcctgccaggcacacagtcggcagctggaggaggctctgaggatacaagaaggtgagatccaggaccaggatctccgataccaggaggatgtgcagcagctgcagcaggcacttgcccagagggatgaagagctgagacatcagcaggaacgggagcagctgctggagaagtctctggcccagagggtccaagagaatatgatccaagagaagcagaatctggggcaagagagagaagaggaggagataaggggccttcatcagagtgtaagggagctacagctgactctagcccaaaaggaacaggagattctggagctgagggagacccagcaaaggaacaacctggaagccttaccccacagccacaaaacctccccaatggaggaacaatctctaaaacttgattctttagagcccaggctgcagcgggagctggagcggctacaggcagccctgagacagacagaagccagggagattgagtggagggagaaggcccaggacttggcactctccctagcgcagaccaaggccagtgtcagcagtctgcaggaggtagccatgttcctacaagcctctgtcctggagcgggactcagaacagcaaaggctgcaggatgaactggagctcaccagacgggctctggagaaggagcggctacacagcccaggtgcaaccagcacagcagaactggggtccagaggggagcagggtgtgcagctgggagaggtctcaggagtggaggctgagcctagtcctgatggaatggagaagcagtcatggagacaaaggcttgaacacctgcagcaagcagtggcccggctggagattgacaggagcaggctgcagcgccacaatgtccagctgcggagtaccttggagcaggtggagcgagaacggaggaagctgaagagggaggccatgcgtgcggcccaggcagggtccctagagatcagcaaggccacggcttcttcacccacacagcaggatgggagaggacagaagaactcagatgccaagtgtgtggctgaactgcagaaagaggtggtcctgctgcaagctcagctgactttggagcggaagcagaagcaggactacatcacccgctcagcacagaccagccgtgagctagcaggcctgcaccacagcctctcacactcacttcttgccgtggcccaggcccctgaggccactgtcctggaggcagagacccgcaggctggatgagtccctgactcaaagtctgacatccccagggccagtcctgctacaccccagccccagcactacccaagccgcctccaggtagcagccacagccaggagcacacagacagaagactgtgtcatgggtcatggcccctccgcacacctacaggtttgccaaaggaaaagcctggctctgttaggcacccaggagccccaggtcggcgggtgttcccaggaagaggaagtaaatctgcaaccctggggaggaccccaactcacctgggaatgaggcaaattgcatttgcttgctccctatggaatcacccagaggggtgccttgccctggctgagggacatgtactgcctctcatctagaatttattttcctagcacttcaccacctccttcatcttctccttcaacaataaaccctgagatctttgcattcat

SEQ ID NO: 10806 - protein, 2386 aa, Homo sapiens; identical to SEQ ID NO: 1668

SEQ ID NO: 10807 - DNA, 8584 bp, Homo sapiens
agtttggggggcggggcctggccctctgcctcggggtgggctccgcccccgtcccccgcagggccttagcagcggctgccgcagctcaatcgcggagcaactagccgggcgtctgcgggagccgagcgtggtgaggtggggcctcaggggcaggtgggaggtgctcgggttaaccgtccgaggcccggagacccgcccgtctagggcgcctgagggaatcccgttcgggcagcggcctcttgttacccgggaggaacccgaggcccagagaggggctgggacgcgtcgttagggcccggggcccgcttgcctcagcttcttgctgccgccagcacgctaagctccagtcggcgccgaaggagagcttcccgaccctcgtgtccagtagccgcaatcccaggctgggagggtgaggcgccgcgctctgccgcccccccgcccctcgctccctgtgtcctggcggatttgcacgtaatctatccgaaagcccagtcccacccgccacccgactctggagctcccattcttcaggaccctgctgaagtatcgcttctcagccgccttctccaggcgcagctgcattcgcttctcggtttttgcactcgctgtgcaccgagttactttcccggcccctcgttgacaccgttcacaggtggctgttggtctttagtaagggtgaggtagagttgttggcagaaatcctgggataagagaatagtttcctggaagatctgtgcctccaaccagcagagagggattgagcttcattgaactcaacagagccaacatttcatagcaccatgttcaagaggaggttgaagtggcatggcaatggttagagaccctgctgggcgtgaacaccctctggctacctagggacctgtgggcctaccacctggtgccctcatggagacaagaagccctgggttgaacaacatgaagccccagtcactgcagctggtactggaagagcaggtgctggcactacagcagcagatggcagagaatcaggcagcctcctggcggaagctgaagaactcccaggaggcccagcagagacaagcaacccttgtgaggaagctgcaggccaaggtgctgcagtaccgaagctggtgccaagagctggagaagcggctagaagccactggaggaccaatcccccagaggtgggaaaatgtggaggagccaaacctggatgagctgctggtccgattggaggaggagcaacagaggtgtgagagtctagcagaggtgaacacccagcttcgactgcacatggaaaaagctgacgtggtgaataaagcccttagggaagatgtggaaaaactgacagtggactggagccgggcccgggatgagctaatgaggaaggagagccagtggcagatggagcaggagttcttcaagggctacctgaaaggggagcacggtcgccttctcagtctatggcgggaggttgtgacattccgacgccacttcctggaaatgaagtcagctactgacagagatctgatggagctaaaagctgagcatgtgaggctttcagggtctctgttgacctgttgtctgcgcttgactgtgggagcacagtctcgggaacccaacggatctggaagaatggatgggcgggagccggcccagctgctgctgctactagccaagacccaggagctggagaaggaagcccatgaaaggagccaggagttaatacagctgaagagtcaaggggatctggagaaggctgaacttcaggaccgggtgaccgagctctctgctctgttgacccagtctcagaagcaaaatgaagattatgaaaagatgataaaggctctgagagagacagtggagatcctggagacaaatcacacagaattaatggaacatgaagcatctcttagtaggaatgcgcaagaggagaagttgtctttacagcaggtgatcaaggatataacccaggtcatggtggaagaaggggacaatatagcccaaggctctggtcatgagaactctttggaattggactctagtatcttctcccagtttgattaccaggatgcagacaaggctcttactctggtgcgttcagtgctgactcggagacgccaggctgtgcaggacctaaggcagcagcttgcaggctgtcaagaggctgtgaacttgttgcaacagcagcatgatcagtgggaggaagagggcaaagccttgagacagcggctgcagaagctcactggggagcgggacactctggcagggcagactgtggacctccagggagaggtggactctctcagcaaggagcgagagctgctgcagaaggccagggaagagctgcggcagcagctggaggtgctagagcaggaggcatggcgcctgcgaagggtaaatgtggagcttcagctgcagggggactctgcccagggccagaaggaggaacagcaggaggagctgcacctggctgtccgggagagggagcgtcttcaggagatgctgatgggcctggaagccaaacagtcagaatcactcagtgaactgatcactcttcgggaagccctggagtcaagtcacctggaaggggagttactgaggcaagagcaaacggaagtgaccgcagcgctggctagggcagagcagtcaattgcagagctgtcgagttctgaaaacaccctgaagacagaagtagctgatcttcgggctgcagctgtcaagctcagtgccttaaatgaggctttggcgttagataaagttgggctgaaccagcagcttctccagttagaggaggagaaccagtctgtgtgcagcagaatggaggccgcagagcaggcgagaaatgctttgcaggtcgacctggcggaggcagagaagaggagggaagccctgtgggaaaagaacactcacctggaggctcagctgcagaaagctgaggaggctggggctgagctgcaggcagatctcagggacatccaagaagagaaggaagaaattcaaaagaaactaagtgagtcacgtcaccagcaggaggcagccacgactcagctggagcagctacatcaggaggcaaagcgacaggaagaagtgcttgccagggcagtccaggagaaggaggccctagtacgagagaaagcggctctagaggtgcggctgcaggccgtggagcgtgaccggcaggacctcgctgaacaactacaggggctcagctcagccaaggagctactggagagcagtctgtttgaagcccaacaacaaaattctgtgatagaggtcaccaaggggcagctggaggtccagattcaaactgtcactcaagccaaggaagtaatccaaggggaagtgaggtgcctgaagctggaactggacactgaacggagtcaggcagagcaggagcgggatgctgcagccagacagctggcccaggctgagcaagaagggaagactgccttggagcagcagaaggcagcccatgagaaagaggtgaaccagctccgggagaaatgggagaaggagcgctcctggcaccagcaggagctggcaaaggctctggagagcttagaaagggaaaaaatggagctggaaatgaggctaaaggagcagcagacagaaatggaggccatccaggcccagagggaagaagaacggacccaggcagagagtgccctatgccagatgcagctggaaacagagaaggagagagtatccctcctggagacactgctgcagacgcagaaggagctagcagatgccagccaacaactggaacgactgaggcaggacatgaaagtccagaaattaaaggagcaggagaccactgggatactacagacccagctccaggaggctcaacgggagctgaaggaggcagcccggcagcacagagatgaccttgctgccctccaagaagagagcagctccctgctgcaggataagatggacctgcagaagcaggtggaggacttgaagtctcagctggtggcccaggatgactcccagaggctggtggagcaggaggttcaggagaagctgagagagacccaggagtataaccgaattcagaaggagctggagagagagaaagccagcctgactctgtcactgatggaaaaggaacagagactccttgttttacaagaagctgactctattcgacaacaagagctgagtgccctgcgccaggacatgcaggaggcccagggagaacagaaagagctcagtgctcagatggaattactaaggcaagaggtgaaggaaaaggaggctgactttctggcccaggaagcacagctgctggaggagctggaggcgtctcatatcacggagcagcagctgcgagcctccttgtgggcccaggaagccaaggcagcccaactacagctgcgactgcgcagcacagagagccagctagaagcgctggccgcagagcagcagcccgggaaccaggcccaggcccaggcccagctggccagcctctactctgccctgcagcaggccctggggtctgtttgtgagagcaggcctgagctgagtggtgggggagactctgctccttccgtctggggccttgagccagaccagaatggagctaggagcctctttaagagagggcccctgctgactgctctctccgctgaggcagtagcatctgccctccacaagcttcatcaagacctgtggaagactcaacagacccgggatgttctgagggatcaggtccagaaactggaagagcgtctaactgatactgaggctgagaagagccaggtccacacagagttgcaggatctgcagagacagctctcccagaatcaggaagagaaatccaagtgggaaggaaagcagaactccctagaatctgagctgatggaactacatgaaactatggcatccttacagagtcgcctgcggagagcagagctacagcgaatggaagcccagggtgagcgagagttacttcaggcagccaaggagaacctgacagcccaggtggaacacctgcaagcagctgtcgtagaagccagggctcaggcaagtgctgctggcatcctggaagaagacctgagaacggctcgctcagcactgaagctgaaaaatgaggaagtagagagtgagcgtgagagagcccaggctctgcaagagcagggcgaactgaaggtggcccaagggaaggctctgcaagagaatttggccctcctgacccagaccctagctgaaagagaagaggaggtggagactctgcggggacaaatccaggaactggagaagcaacgggaaatgcagaaggctgctttggaattgctgtctctggacctgaagaagaggaaccaagaggtagatctgcagcaagaacagattcaggagctagagaagtgtaggtctgttttagagcatctgcccatggccgtccaggagcgagagcagaagctgactgtgcagagggagcagatcagagagctcgagaaggatcgggagactcagaggaacgtcttggagcatcagcttctagaacttgagaagaaagaccaaatgattgagtcccagagaggacaggttcaggacctgaaaaagcagttggttactctggaatgcctggccctggaactggaggaaaaccatcacaagatggagtgccagcaaaaactgatcaaggagctggagggccagagggaaacccagagagtggctttgacccaccttacgctggacctagaagaaaggagccaggagctgcaggcacaaagcagccagatccatgacctggagagccacagcaccgttctggcaagagagctgcaggagagggaccaggaggtgaagtctcagcgagaacagatcgaggagctgcagaggcagaaagagcatctgactcaggatctcgagaggagagaccaggagctgatgctgcagaaggagaggattcaggttctcgaggatcagaggacccggcagaccaagatcctggaggaggacctggaacagatcaagctgtccttgagagagcgaggccgggagctgaccactcagaggcagctgatgcaggaacgggcagaggaagggaagggcccaagtaaagcacagcgcgggagcctagagcacatgaagctgatcctgcgtgataaggagaaggaggtggaatgtcagcaggagcatatccatgaactccaggagctcaaagaccagctggagcagcagctccagggcctgcacaggaaggtaggtgagaccagcctcctcctgtcccagcgagagcaggaaatagtggtcctgcagcagcaactgcaggaagccagggaacaaggggagctgaaggagcagtcacttcagagtcaactggatgaggcccagagagccctagcccagagggaccaggaactggaggctctgcagcaagaacagcagcaggcccagggacaggaggagagggtgaaggaaaaggcagacgccctccagggagctctggagcaagcccatatgacactgaaggagcgtcatggagagcttcaggaccacaaggaacaggcacgaaggctggaggaagagctggcagtggagggacggcgggtccaggccctggaggaggtgctgggagacctaagggctgagtctcgggaacaggagaaagctctgttggccctccagcagcagtgtgctgagcaggcacaggagcatgaggtggagaccagggccctgcaggacagctggctgcaggcccaggcagtgctcaaggaacgggaccaggagctggaagctctgcgggcagaaagtcagtcctcccggcatcaggaggaggctgcccgggcccgggctgaggctctgcaggaggcccttggcaaggctcatgctgccctgcaggggaaagagcagcatctcctcgagcaggcagaattgagccgcagtctggaggccagcactgcaaccctgcaagcctccctggatgcctgccaggcacacagtcggcagctggaggaggctctgaggatacaagaaggtgagatccaggaccaggatctccgataccaggaggatgtgcagcagctgcagcaggcacttgcccagagggatgaagagctgagacatcagcaggaacgggagcagctgctggagaagtctctggcccagagggtccaagagaatatgatccaagagaagcagaatctggggcaagagagagaagaggaggagataaggggccttcatcagagtgtaagggagctacagctgactctagcccaaaaggaacaggagattctggagctgagggagacccagcaaaggaacaacctggaagccttaccccacagccacaaaacctccccaatggaggaacaatctctaaaacttgattctttagagcccaggctgcagcgggagctggagcggctacaggcagccctgagacagacagaagccagggagattgagtggagggagaaggcccaggacttggcactctccctagcgcagaccaaggccagtgtcagcagtctgcaggaggtagccatgttcctacaagcctctgtcctggagcgggactcagaacagcaaaggctgcaggatgaactggagctcaccagacgggctctggagaaggagcggctacacagcccaggtgcaaccagcacagcagaactggggtccagaggggagcagggtgtgcagctgggagaggtctcaggagtggaggctgagcctagtcctgatggaatggagaagcagtcatggagacaaaggcttgaacacctgcagcaagcagtggcccggctggagattgacaggagcaggctgcagcgccacaatgtccagctgcggagtaccttggagcaggtggagcgagaacggaggaagctgaagagggaggccatgcgtgcggcccaggcagggtccctagagatcagcaaggccacggcttcttcacccacacagcaggatgggagaggacagaagaactcagatgccaagtgtgtggctgaactgcagaaagaggtggtcctgctgcaagctcagctgactttggagcggaagcagaagcaggactacatcacccgctcagcacagaccagccgtgagctagcaggcctgcaccacagcctctcacactcacttcttgccgtggcccaggcccctgaggccactgtcctggaggcagagacccgcaggctggatgagtccctgactcaaagtctgacatccccagggccagtcctgctacaccccagccccagcactacccaagccgcctccaggtagcagccacagccaggagcacacagacagaagactgtgtcatgggtcatggcccctccgcacacctacaggtttgccaaaggaaaagcctggctctgttaggcacccaggagccccaggtcggcgggtgttcccaggaagaggaagtaaatctgcaaccctggggaggaccccaactcacctgggaatgaggcaaattgcatttgcttgctccctatggaatcacccagaggggtgccttgccctggctgagggacatgtactgcctctcatctagaatttattttcctagcacttcaccacctccttcatcttctccttcaacaataaaccctgagatctttgcattcat

SEQ ID NO: 10808 - protein, 2442 aa, Homo sapiens; identical to SEQ ID NO: 1670

SEQ ID NO: 10809 - DNA, 600 bp, Homo sapiens
atactgccggaactgtggctaatggtgcggaccaccctgctcactgttagcaaagtgggtagctaccctctcttctggaagcccctctgcagcactcctcttgggagtagaaaaggaagtggtcaagacctacatttgggagctgatccgtcttgctctcagttagggcccagcccttctgtggggaccaggaaaatctttgctcacctggagaagctgctggttcagcccaactttatctaacgccaaagcctcatttaaggcactgagcttgacagctgcagcccgaagatcagctacttctgtcttcagggtgttttcagaactcgacagctctgcaattgactgctctgcctaaaaaacaaaaaggattaaagagtttcatatttccaattttcctggaacagtaaacagttcacattcccaacactgctgctttttggtacagagatcagttaatactccattccctctcctgcattctaaacaagttttcccttcattcattcattaaggagtgagacaggacctcacagtatagagataccaaagttaggatagagaaatgactatgattgtaatgatgccacagaaaatgta

SEQ ID NO: 10810 - protein, 73 aa, Homo sapiens
MVRTTLLTVSKVGSYPLFWKPLCSTPLGSRKGSGQDLHLGADPSCSQLGPSPSVGTRKIFAHLEKLLVQPNFI

SEQ ID NO: 10811 - DNA, 482 bp, Homo sapiens
ccctctcttctggaagcccctctgcagcactcctcttgggagtagaaaaggaagtggtcaagggaatggggtttcgccgtgttgtccaggctggtctcaaactcctgggctcaagcaatctgcccacctcagcctcccaaagtgctgagatgacaggcatgagccactgtccctggcccagacctacatttgggagctgatccgtcttgctctcagttagggcccagcccttctgtggggaccaggaaaatctttgctcacctggagaagctgctggttcagcccaactttatctaacgccaaagcctcatttaaggcactgagcttgacagctgcagcccgaagatcagctacttctgtcttcagggtgttttcagaactcgacagctctgcaattgactgctctgcctaaaaaacaaaaaggattaaagagtttcatatttccaattttcctggaacagtaaacagttcacattcccaac

SEQ ID NO: 10812 - protein, 44 aa, Homo sapiens
MGFRRVVQAGLKLLGSSNLPTSASQSAEMTGMSHCPWPRPTFGS

SEQ ID NO: 10813 - DNA, 485 bp, Homo sapiens
taccctctcttctggaagcccctctgcagcactcctcttgggagtagaaaaggaagtggtcaaggtcgacctgcaaagcatttctcgcctgctctgcggcctccattctgctgcacacagactggttctcctcctctaactactggccaaaaagggaagggagtacaagcatcaaagacaaatgacctacatttgggagctgatccgtcttgctctcagttagggcccagcccttctgtggggaccaggaaaatctttgctcacctggagaagctgctggttcagcccaactttatctaacgccaaagcctcatttaaggcactgagcttgacagctgcagcccgaagatcagctacttctgtcttcagggtgttttcagaactcgacagctctgcaattgactgctctgcctaaaaaacaaaaaggattaaagagtttcatatttccaattttcctggaacagtaaacagttcacattcccaac

SEQ ID NO: 10814 - protein, 99 aa, Homo sapiens
YPLFWKPLCSTPLGSRKGSGQGRPAKHFSPALRPPFCCTQTGSPPLTTGQKGKGVQASKTNDLHLGADPSCSQLGPSPSVGTRKIFAHLEKLLVQPNFI

SEQ ID NO: 10815 - DNA, 754 bp, Homo sapiens
ttatagtcagcctttttttccttctttttggtgggggagacaggatttcactatgtcgcccgggctgaagtgcagatcataactcactgcagtcttgacttcccaagctcaagcaattctcccacctcagccccctgagtagctgggactacagatgtgtgccatcacactggctaatttttaaatttttatagagacagggtctcactatgttgcccagactgatctcgaactcctggtctcaagcagtctgctcgccttggcctcccaaagtgttgagattacaggtgtgagccaccgcacccagcccagccaagatttttatttgtgcctgcctctatgcagcatatgtgaggctgggaggcagatgaccaggccgaattgtattgaggaagggggtggttaagaacagtgtgtaggaattggtagaatcgccagagcattggaaatggccactgactatggtaaacctcgaaggaccctgaagccctaggtgaggagcatcttcccaccggccccctgccctgccatcttggtcttcatgcccttaattttccaggtggaggacttgaagtctcagctggtggcccaggatgactcccagaggctggtggagcaggaggttcaggagaagctgagagagacccaggagtataaccgaattcagaaggagctggagagagagaaagccagcctgactctgtcactgatggaaaaggaacagagactccttgttttacaagaagctgactct

SEQ ID NO: 10816 - protein, 70 aa, Homo sapiens
MPLIFQVEDLKSQLVAQDDSQRLVEQEVQEKLRETQEYNRIQKELEREKASLTLSLMEKEQRLLVLQEAD

SEQ ID NO: 10817 - DNA, 3120 bp, Homo sapiens
atcacggagcagcagctgcgagcctccttgtgggcccaggaagccaaggcagcccaactacagctgcgactgcgcagcacagagagccagctagaagcgctggccgcagagcagcagcccgggaaccaggcccaggcccaggcccagctggccagcctctactctgccctgcagcaggccctggggtctgtttgtgagagcaggcctgagctgagtggtgggggagactctgctccttccgtctggggccttgagccagaccagaatggagctaggagcctctttaagagagggcccctgctgactgctctctccgctgaggcagtagcatctgccctccacaagcttcatcaagacctgtggaagactcaacagacccggagaaatccaagtgggaaggaaagcagaactccctagaatctgagctgatggaactacatgaaactatggcatccttacagagtcgcctgcggagagcagagctacagcgaatggaagcccagggtgagcgagagttacttcaggcagccaaggagaacctgacagcccaggtggaacacctgcaagcagctgtcgtagaagccagggctcaggcaagtgctgctggcatcctggaagaagacctgagaacggctcgctcagcactgaagctgaaaaatgaggaagtagagagtgagcgtgagagagcccaggctctgcaagagcagggcgaactgaaggtggcccaagggaaggctctgcaagagaatttggccctcctgacccagaccctagctgaaagagaagaggaggtggagactctgcggggacaaatccaggaactggagaagcaacgggaaatgcagaaggctgctttggaattgctgtctctggacctgaagaagaggaaccaagaggtagatctgcagcaagaacagattcaggagctagagaagtgtaggtctgttttagagcatctgcccatggccgtccaggagcgagagcagaagctgactgtgcagagggagcagatcagagagctcgagaaggatcgggagactcagaggaacgtcttggagcatcagcttctagaacttgagaagaaagaccaaatgattgagtcccagagaggacaggttcaggacctgaaaaagcagttggttactctggaatgcctggccctggaactggaggaaaaccatcacaagatggagtgccagcaaaaactgatcaaggagctggagggccagagggaaacccagagagtggctttgacccaccttacgctggacctagaagaaaggagccaggagctgcaggcacaaagcagccagatccatgacctggagagccacagcaccgttctggcaagagagctgcaggagagggaccaggaggtgaagtctcagcgagaacagatcgaggagctgcagaggcagaaagagcatctgactcaggatctcgagaggagagaccaggagctgatgctgcagaaggagaggattcaggttctcgaggatcagaggacccggcagaccaagatcctggaggaggacctggaacagatcaagctgtccttgagagagcgaggccgggagctgaccactcagaggcagctgatgcaggaacgggcagaggaagggaagggcccaagtaaagcacagcgcgggagcctagagcacatgaagctgatcctgcgtgataaggagaaggaggtggaatgtcagcaggagcatatccatgaactccaggagctcaaagaccagctggagcagcagctccagggcctgcacaggaaggtaggtgagaccagcctcctcctgtcccagcgagagcaggaaatagtggtcctgcagcagcaactgcaggaagccagggaacaaggggagctgaaggagcagtcacttcagagtcaactggatgaggcccagagagccctagcccagagggaccaggaactggaggctctgcagcaagaacagcagcaggcccagggacaggaggagagggtgaaggaaaaggcagacgccctccagggagctctggagcaagcccatatgacactgaaggagcgtcatggagagcttcaggaccacaaggaacaggcacgaaggctggaggaagagctggcagtggagggacggcgggtccaggccctggaggaggtgctgggagacctaagggctgagtctcgggaacaggagaaagctctgttggccctccagcagcagtgtgctgagcaggcacaggagcatgaggtggagaccagggccctgcaggacagctggctgcaggcccaggcagtgctcaaggaacgggaccaggagctggaagctctgcgggcagaaagtcagtcctcccggcatcaggaggaggctgcccgggcccgggctgaggctctgcaggaggcccttggcaaggctcatgctgccctgcaggggaaagagcagcatctcctcgagcaggcagaattgagccgcagtctggaggccagcactgcaaccctgcaagcctccctggatgcctgccaggcacacagtcggcagctggaggaggctctgaggatacaagaaggtgagatccaggaccaggatctccgataccaggaggatgtgcagcagctgcagcaggcacttgcccagagggatgaagagctgagacatcagcaggaacgggagcagctgctggagaagtctctggcccagagggtccaagagaatatgatccaagagaagcagaatctggggcaagagagagaagaggaggagataaggggccttcatcagagtgtaagggagctacagctgactctagcccaaaaggaacaggagattctggagctgagggagacccagcaaaggaacaacctggaagccttaccccacagccacaaaacctccccaatggaggaacaatctctaaaacttgattctttagagcccaggctgcagcgggagctggagcggctacaggcagccctgagacagacagaagccagggagattgagtggagggagaaggcccaggacttggcactctccctagcgcagaccaaggccagtgtcagcagtctgcaggaggtagccatgttcctacaagcctctgtcctggagcgggactcagaacagcaaaggctgcagg

SEQ ID NO: 10818 - protein, 896 aa, Homo sapiens
MELHETMASLQSRLRRAELQRMEAQGERELLQAAKENLTAQVEHLQAAVVEARAQASAAGILEEDLRTARSALKLKNEEVESERERAQALQEQGELKVAQGKALQENLALLTQTLAEREEEVETLRGQIQELEKQREMQKAALELLSLDLKKRNQEVDLQQEQIQELEKCRSVLEHLPMAVQEREQKLTVQREQIRELEKDRETQRNVLEHQLLELEKKDQMIESQRGQVQDLKKQLVTLECLALELEENHHKMECQQKLIKELEGQRETQRVALTHLTLDLEERSQELQAQSSQIHDLESHSTVLARELQERDQEVKSQREQIEELQRQKEHLTQDLERRDQELMLQKERIQVLEDQRTRQTKILEEDLEQIKLSLRERGRELTTQRQLMQERAEEGKGPSKAQRGSLEHMKLILRDKEKEVECQQEHIHELQELKDQLEQQLQGLHRKVGETSLLLSQREQEIVVLQQQLQEAREQGELKEQSLQSQLDEAQRALAQRDQELEALQQEQQQAQGQEERVKEKADALQGALEQAHMTLKERHGELQDHKEQARRLEEELAVEGRRVQALEEVLGDLRAESREQEKALLALQQQCAEQAQEHEVETRALQDSWLQAQAVLKERDQELEALRAESQSSRHQEEAARARAEALQEALGKAHAALQGKEQHLLEQAELSRSLEASTATLQASLDACQAHSRQLEEALRIQEGEIQDQDLRYQEDVQQLQQALAQRDEELRHQQEREQLLEKSLAQRVQENMIQEKQNLGQEREEEEIRGLHQSVRELQLTLAQKEQEILELRETQQRNNLEALPHSHKTSPMEEQSLKLDSLEPRLQRELERLQAALRQTEAREIEWREKAQDLALSLAQTKASVSSLQEVAMFLQASVLERDSEQQRL

SEQ ID NO: 10819 - DNA, 1243 bp, Homo sapiens
ggcgaactgaaggtggcccaagggaaggctctgcaagagaatttggccctcctgacccagaccctagctgaaagagaagaggaggtggagactctgcggggacaaatccaggaactggagaagcaacgggaaatgcagaaggctgctttggaattgctgtctctggacctgaagaagaggaaccaagaggtagatctgcagcaagaacagattcaggagctagagaagtgtaggtctgttttagagcatctgcccatggccgtccaggagcgagagcagaagctgactgtgcagagggagcagatcagagagctcgagaaggatcgggagactcagaggaacgtcttggagcatcagcttctagaacttgagaagaaagaccaaatgattgagtcccagagaggacaggttcaggacctgaaaaagcagttggttactctggaatgcctggccctggaactggaggaaaaccatcacaagatggagtgccagcaaaaactgatcaaggagctggagggccagagggaaacccagagagtggctttgacccaccttacgctggacctagaagaaaggagccaggagctgcaggcacaaagcagccagatccatgacctggagagccacagcaccgttctggcaagagagctgcaggagagggaccaggaggtgaagtctcagcgagaacagatcgaggagctgcctccctctggacctattcagtcctcaagggtgccctgctaaaggctgggctgaaagctaagaggagaggtggcattcaatgtgtcctgtgtcctccctggggttgattaaggggtcgatgcccaatagagtccttcatcttggcgttcagcccagggtccagctgccaagggaaggcttggcaatcaagggtgatggagataagaatgaaaaggggcaccaccctgtgccaaagctggcatgttgtatatctgagagaggagctgcctattcacagtgtagggttgtcaagctggaggcagggagagaaaagcaagagctttttggttcctcttgaggatagaatctataggaaaatgtaagagggttaaaaataaatttcccatgcatccaaacttttttctttggtagactttcttgtcatctatttaaaatgaaacaagtgcatgtacgtggttaagacattttagctaggaatgatggtgcgtgcctgtagtcccagctacttgggaggctgaggcaggaggatcgcttgaacctg

SEQ ID NO: 10820 - protein, 203 aa, Homo sapiens
MQKAALELLSLDLKKRNQEVDLQQEQIQELEKCRSVLEHLPMAVQEREQKLTVQREQIRELEKDRETQRNVLEHQLLELEKKDQMIESQRGQVQDLKKQLVTLECLALELEENHHKMECQQKLIKELEGQRETQRVALTHLTLDLEERSQELQAQSSQIHDLESHSTVLARELQERDQEVKSQREQIEELPPSGPIQSSRVPC

SEQ ID NO: 10821 - DNA, 1458 bp, Homo sapiens
ggcagaccaagatcctggaggaggacctggaacagatcaagctgtccttgagagagcgaggccgggagctgaccactcagaggcagctgatgcaggaacgggcagaggaagggaagggcccaagtaaagcacagcgcgggagcctagagcacatgaagctgatcctgcgtgataaggagaaggaggtggaatgtcagcaggagcatatccatgaactccaggagctcaaagaccagctggagcagcagctccagggcctgcacaggaaggtaggtgagaccagcctcctcctgtcccagcgagagcaggaaatagtggtcctgcagcagcaactgcaggaagccagggaacaaggggagctgaaggagcagtcacttcagagtcaactggatgaggcccagagagccctagcccagagggaccaggaactggaggctctgcagcaagaacagcagcaggcccagggacaggaggagagggtgaaggaaaaggcagacgccctccagggagctctggagcaagcccatatgacactgaaggagcgtcatggagagcttcaggaccacaaggaacaggcacgaaggctggaggaagagctggcagtggagggacggcgggtccaggccctggaggaggtgctgggagacctaagggctgagtctcgggaacaggagaaagctctgttggccctccagcagcagtgtgctgagcaggcacaggagcatgaggtggagaccagggccctgcaggacagctggctgcaggcccaggcagtgctcaaggaacgggaccaggagctggaagctctgcgggcagaaagtcagtcctcccggcatcaggaggaggctgcccgggcccgggctgaggctctgcaggaggcccttggcaaggctcatgctgccctgcaggggaaagagcagcatctcctcgagcaggcagaattgagccgcagtctggaggccagcactgcaaccctgcaagcctccctggatgcctgccaggcacacagtcggcagctggaggaggctctgaggatacaagaaggtgagatccaggaccaggatctccgataccaggaggatgtgcagcagctgcagcaggcacttgcccagagggatgaagagctgagacatcagcaggaacgggagcagctgctggagaagtctctggcccagagggtccaagagaatatgatccaagagaagcagaatctggggcaagagagagaagaggaggagataaggggccttcatcagagtagcccaggctgcagcgggagctggagcggctacaggcagccctgagacagacagaagccagggagattgagtggagggagaaggcccaggacttggcactctccctagcgcagaccaaggccagtgtcagcagtctgcaggaggtagccatgttcctacaagcctctgtcctggagcgggactcagaacagcaaaggct

SEQ ID NO: 10822 - protein, 404 aa, Homo sapiens
MQERAEEGKGPSKAQRGSLEHMKLILRDKEKEVECQQEHIHELQELKDQLEQQLQGLHRKVGETSLLLSQREQEIVVLQQQLQEAREQGELKEQSLQSQLDEAQRALAQRDQELEALQQEQQQAQGQEERVKEKADALQGALEQAHMTLKERHGELQDHKEQARRLEEELAVEGRRVQALEEVLGDLRAESREQEKALLALQQQCAEQAQEHEVETRALQDSWLQAQAVLKERDQELEALRAESQSSRHQEEAARARAEALQEALGKAHAALQGKEQHLLEQAELSRSLEASTATLQASLDACQAHSRQLEEALRIQEGEIQDQDLRYQEDVQQLQQALAQRDEELRHQQEREQLLEKSLAQRVQENMIQEKQNLGQEREEEEIRGLHQSSPGCSGSWSGYRQP

SEQ ID NO: 10823 - DNA, 496 bp, Homo sapiens
aggtatatccaggaaagttggctggagaaccatggtcagtatccgtccttggagtttgtggctctgttgtatgccttgcatacctgtgaccaggtatccttgtttggttttggggaagacaattgcaaaaggtggtcccattactgggatgacaaatattggtttgagaacaccatgcaaaatttcccagcagaataccagatcatcttgaaactgcagtgtgagaggaagattgctgtctacggctgagatgtttccagtggagtccccaggaggcttgacaggtagccaaggggaccttgtggtgtcagagagggactagggcttcaagcagaccctggatggagattactctgctactgaataaaaccctagcttatttctctctctggatttctggtggcattaaagggctacattctattactgattctgtcttatcaccatgtgactctcttatgctgtatcttaccaaaaaataaaattaaatgagaaa

SEQ ID NO: 10824 - protein, 59 aa, Homo sapiens
MVSIRPWSLWLCCMPCIPVTRYPCLVLGKTIAKGGPITGMTNIGLRTPCKISQQNTRSS

SEQ ID NO: 10825 - DNA, 870 bp, Homo sapiens
atgctggggacttctgtggccccagcctcttcttcccggtgccaggtgtcggggccaatctactgtctgccaggggcaccatcatcagggccagagatcatgattcgatacaggagtttgggcctggtggctgcctatgtcctttcattgtggctgatcacctccttcctacaccagcactccagccagaaggacctccgtaatatggccaagatacacccaggaatctgccaccatcccagcaacttttccagaaaatgcaactgctcatctgaggtccacacatgctctgcctgcctccacgtgcctggcgagtctgactggtttgacagacgcttcgacagtaccgttgaacccctacagaggccacaagatcccacgtccaatgatgctctgatattgtggctgggactcgagagggtcaagtcagagaaggaggttgagaataagcagcagcagctgattaaagcacctcccctgtgcccactgggccatgtggtgtccaactgccgggtctgtgcagtggtgggaaactcaaggtctctatggagctctggccttggcttcaggattaatcaacatgaagtggtcctcaggatgaaccaggcccctgtctgaggctttgaggcagatgtggggaacaggaccaccatgcgcgttatgtaccctgggattgccagccctcaggaccccggtacccaactgctgctgcttccgttgaattcatctggtctggagtggttcataagtgtactgcataaacagacaagcatgtggaagcaaaaaaaaccctggatttcagacggttcaggttcctggtggaaccgaagacagcaaagataaggtgctggtgatcagcctctacttcct

SEQ ID NO: 10826 - protein, 205 aa, Homo sapiens
MLGTSVAPASSSRCQVSGPIYCLPGAPSSGPEIMIRYRSLGLVAAYVLSLWLITSFLHQHSSQKDLRNMAKIHPGICHHPSNFSRKCNCSSEVHTCSACLHVPGESDWFDRRFDSTVEPLQRPQDPTSNDALILWLGLERVKSEKEVENKQQQLIKAPPLCPLGHVVSNCRVCAVVGNSRSLWSSGLGFRINQHEVVLRMNQAPV

SEQ ID NO: 10827 - DNA, 1034 bp, Homo sapiens
acatgctgtctctctgccctggcctcttccaccccatgcccagtcagagaccgttttgaggcattgcgactgcccttggttcagttccgggaagtgtggctgcccttctgagaccctcaactgctcctcctgccaccacacagccgacgaatggaactggcttgatgcgtgctccaggaagactatggggtacctgatgaggacaagagagtctatgacctctgacactgtgctctggtggttggtcagtggtcaacactgggcccggccatatcccccatgctttccgggcctcacccatctcccactttccgcccaaatccctgcccttggccctgtcttcacagcctctggatggagatctcacccacccagctctgttttctctcccctgggcccagcccccaatctccctcttgctgtttccagggcatgaactcagggagcgagcttgggaaattgtggaggaagctgtttaaagggattcccaggctctcggtgagccattttgatttctattgtgggacttgtgtgctgttggggcgcccacagatcccgcagggctccagccttggcaacgacatcgaccaataccccgtggttttcaggaatgccagcgaccagggctcctggatgcagctggagatgctactgcggaagctctctgacctggtgtggacttcagatgctctaagtgataagattttggaagatggtctggttccctagtggagtggaagatagcaaagacacggtcaccctctttggatttggatcagaatagcaaggaaagtgtttctatcactggaaggaggataatcagaccaagggctccaaggaaatactgcccacgtctagtgcaggagcagaaatcgaagtcatccatcagctagcgtgtggacaagctcactattcacacaagctcagcctagctgagtccatacaaatcctatttctgggtgggtaaagggcaggaggaaattgtaagatcagtctggtactgaataaaatcctggcctgattgtcttacctgt

SEQ ID NO: 10828 - protein, 149 aa, Homo sapiens
MLSGPHPSPTFRPNPCPWPCLHSLWMEISPTQLCFLSPGPSPQSPSCCFQGMNSGSELGKLWRKLFKGIPRLSVSHFDFYCGTCVLLGRPQIPQGSSLGNDIDQYPVVFRNASDQGSWMQLEMLLRKLSDLVWTSDALSDKILEDGLVP

SEQ ID NO: 10829 - DNA, 383 bp, Homo sapiens
agccacatgctgtctctctgccctggcctcttccaccccatgcccagtcagagaccgttttgaggcattgcgactgcccttggttcagttccgggaagtgtggctgcccttctgagaccctcaactgctcctcctgccaccacacagccgacgaatggaactggcttgatgcgtgctccaggaagactatggggtacctgatgaggacaagagagtctatgacctctgacactgtgctctggtggttgggcatgaactcagggagcgagcttgggaaattgtggaggaagctgtttaaagggattcccaggctctcggtgagccattttgatttctattgtgggacttgtgtgctgttggggcgcccacagatcccgcagggc

SEQ ID NO: 10830 - protein, 64 aa, Homo sapiens
MGYLMRTRESMTSDTVLWWLGMNSGSELGKLWRKLFKGIPRLSVSHFDFYCGTCVLLGRPQIPQ

SEQ ID NO: 10831 - DNA, 536 bp, Homo sapiens
actgaggtattccttcccctctcaggactagccacatgctgtctctctgccctggcctcttccaccccatgcccagtcagagaccgttttgagggtagagaagccagtctacggcccaccacgggagccaccgcctgggccagacatgaagcgctggcagatttttgtcctgtgggtcttttgggtgctcatcctctggctgatgaccccctatctggatctgacacctgaatcagcaccccaggaaaaacgaatgtacttggtaccacagcattgcgactgcccttggttcagttccgggaagtgtggctgcccttctgagaccctcaactgctcctcctgccaccacacagccgacgaatggaactggcttgatgcgtgctccaggaagactatggggtacctgatgaggacaagagagtctatgacctctgacactgtgctctggtggttgggcatgaactcagggagcgagcttgggaaattgtggaggaagctgtttaaagggattcccaggctctcggtgagccattttg

SEQ ID NO: 10832 - protein, 129 aa, Homo sapiens
MKRWQIFVLWVFWVLILWLMTPYLDLTPESAPQEKRMYLVPQHCDCPWFSSGKCGCPSETLNCSSCHHTADEWNWLDACSRKTMGYLMRTRESMTSDTVLWWLGMNSGSELGKLWRKLFKGIPRLSVSH

SEQ ID NO: 10833 - DNA, 789 bp, Homo sapiens
aggggggcgtggctccaggccggaagagggagtctgtaggggcgggccggctggcgtcccctttccggccggtccccatggaggcgctggggaagctgaagcagttcgatgcctaccccaagactttggaggacttccgggtcaagacctgcgggggcgccaccgtgaccattgtcagtggccttctcatgctgctactgttcctgtccgagctgcagtattacctcaccacggaggtgcatcctgagctctacgtggacaagtcgcggggagataaactgaagatcaacatcgatgtactttttccgcacatgccttgtgcctatctgagtattgatgccatggatgtggccggagaacagcagctggatgtggaacacaacctgttcaagcaacgactagataaagatggcatccccgtgagctcagaggctgagcggcatgagcttgggaaagtcgaggtgacggtgtttgaccctgactccctggaccctgatcgctgtgagagctgctatggtgctgaggcagaagatatcaagtgctgtaacacctgtgaagatgtgcgggaggcatatcgcctggctggactcatcgattcgctcatctaccactcagcacgagccatccagaagaaaattgatctagggaagacaacgtagtcaccctcggtgcttcctctgtctcctctttctccctggcctgtggttgtcccccagcctctgccaccctccacctcctcggtcagccccagccccaggttgataaatctattgattgattgtgatagta

SEQ ID NO: 10834 - protein, 193 aa, Homo sapiens
MEALGKLKQFDAYPKTLEDFRVKTCGGATVTIVSGLLMLLLFLSELQYYLTTEVHPELYVDKSRGDKLKINIDVLFPHMPCAYLSIDAMDVAGEQQLDVEHNLFKQRLDKDGIPVSSEAERHELGKVEVTVFDPDSLDPDRCESCYGAEAEDIKCCNTCEDVREAYRLAGLIDSLIYHSARAIQKKIDLGKTT

SEQ ID NO: 10835 - DNA, 1369 bp, Homo sapiens
gtggctccaggccggaagagggagtctgtaggggcgggccggctggcgtcccctttccggccggtccccatggaggcgctggggaagctgaagcagttcgatgcctaccccaagactttggaggacttccgggtcaagacctgcgggggcgccaccgtgaccattgtcagtggccttctcatgctgctactgttcctgtccgagctgcagtattacctcaccacggaggtgcatcctgagctctacgtggacaagtcgcggggagataaactgaagatcaacatcgatgtactttttccgcacatgccttgtgcctatctgagtattgatgccatggatgtggccggagaacagcagctggatgtggaacacaacctgttcaagcaacgactagataaagatggcatccccgtgagctcagaggctgagcggcatgagcttgggaaagtcgaggtgacggtgtttgaccctgactccctggaccctgatcgctgtgagagctgctatggtgctgaggcagaagatatcaagtgctgtaacacctgtgaagatgtgcgggaggcatatcgccgtagaggctgggccttcaagaacccagatactattgagcagtgccggcgagagggcttcagccagaagatgcaggagcagaagaatgaaggctgccaggtgtatggcttcttggaagtcaataaggtggccggaaacttccactttgcccctgggaagagcttccagcagtcccatgtgcacgtacatgctgtggagatccatgacttgcagagctttggccttgacaacatcaacatgacccactacatccagcacctgtcatttggggaggactatccaggcattgtgaaccccctggaccacaccaatgtcactgcgccccaagcctccatgatgttccagtactttgtgaaggtggtgcccactgtgtacatgaaggtggacggagaggtactgaggacaaatcagttctctgtgaccagacatgagaaggttgccaatgggctgttgggcgaccaaggccttcccggagtcttcgtcctctatgagctctcgcccatgatggtgaagctgacggagaagcacaggtccttcacccacttcctgacaggtgtgtgcgccatcattgggggcatgttcacagtggctggactcatcgattcgctcatctaccactcagcacgagccatccagaagaaaattgatctagggaagacaacgtagtcaccctcggtgcttcctctgtctcctctttctccctggcctgtggttgtcccccagcctctgccaccctccacctcctcggtcagccccagccccaggttgataaatctattgattgattgtgatagtactc

SEQ ID NO: 10836 - protein, 388 aa, Homo sapiens; identical to SEQ ID NO: 1676

SEQ ID NO: 10837 - DNA, 1355 bp, Homo sapiens
gtggctccaggccggaagagggagtctgtaggggcgggccggctggcgtcccctttccggccggtccccatggaggcgctggggaagctgaagcagttcgatgcctaccccaagactttggaggacttccgggtcaagacctgcgggggcgccaccgtgaccattgtcagtggccttctcatgctgctactgttcctgtccgagctgcagtattacctcaccacggaggtgcatcctgagctctacgtggacaagtcgcggggagataaactgaagatcaacatcgatgtactttttccgcacatgccttgtgcctatctgagtattgatgccatggatgtggccggagaacagcagctggatgtggaacacaacctgttcaagcaacgactagataaagatggcatccccgtgagctcagaggctgagcggcatgagcttgggaaagtcgaggtgacggtgtttgaccctgactccctggaccctgatcgctgtgagagctgctatggtgctgaggcagaagatatcaagtgctgtaacacctgtgaagatgtgcgggaggcatatcgccgtagaggctgggccttcaagaacccagatactattgagcagtgccggcgagagggcttcagccagaagatgcaggagcagaagaatgaaggctgccaggtgtatggcttcttggaagtcaataaggtggccggaaacttccactttgcccctgggaagagcttccagcagtcccatgtgcacgtccatgacttgcagagctttggccttgacaacatcaacatgacccactacatccagcacctgtcatttggggaggactatccaggcattgtgaaccccctggaccacaccaatgtcactgcgccccaagcctccatgatgttccagtactttgtgaaggtggtgcccactgtgtacatgaaggtggacggagaggtactgaggacaaatcagttctctgtgaccagacatgagaaggttgccaatgggctgttgggcgaccaaggccttcccggagtcttcgtcctctatgagctctcgcccatgatggtgaagctgacggagaagcacaggtccttcacccacttcctgacaggtgtgtgcgccatcattgggggcatgttcacagtggctggactcatcgattcgctcatctaccactcagcacgagccatccagaagaaaattgatctagggaagacaacgtagtcaccctcggtgcttcctctgtctcctctttctccctggcctgtggttgtcccccagcctctgccaccctccacctcctcggtcagccccagccccaggttgataaatctattgattgattgtgatagtactca

SEQ ID NO: 10838 - protein, 383 aa, Homo sapiens; identical to SEQ ID NO: 1674

SEQ ID NO: 10839 - DNA, 687 bp, Homo sapiens
tggctccaggccggaagagggagtctgtaggggcgggccggctggcgtcccctttccggccggtccccatggaggcgctggggaagctgaagcagttcgatgcctaccccaagactttggaggacttccgggtcaagacctgcgggggcgccaccgtgaccattgtcagtggccttctcatgctgctactgttcctgtccgagctgcagtattacctcaccacggaggtgcatcctgagctctacgtggacaagtcgcggggagataaactgaagatcaacatcgatgtactttttccgcacatgccttgtgcctatctgagtattgatgccatggatgtggccggagaacagcagctggatgtggaacacaacctgttcaagcaacgactagataaagatggcatccccgtgagctcagaggctgagcggcatgcagattaatgcaggacaccagtggaaccaacataatttgctataggactggatgtggagtggaggagagcaaagtcatggttgttgattccaacgctttcagcctgagcaaatgaatgacttgagatggagatgactggaggagaaggtttttttggtgggagggaggagtggctattggatatccactgctgtgtaacaaagtactccaaaagttagtagtttgatacaataaaaatgtgttttttcagtt

SEQ ID NO: 10840 - protein, 124 aa, Homo sapiens
MEALGKLKQFDAYPKTLEDFRVKTCGGATVTIVSGLLMLLLFLSELQYYLTTEVHPELYVDKSRGDKLKINIDVLFPHMPCAYLSIDAMDVAGEQQLDVEHNLFKQRLDKDGIPVSSEAERHAD

SEQ ID NO: 10841 - DNA, 1672 bp, Homo sapiens
tggctccaggccggaagagggagtctgtaggggcgggccggctggcgtcccctttccggccggtccccatggaggcgctggggaagctgaagcagttcgatgcctaccccaagactttggaggacttccgggtcaagacctgcgggggcgccaccgtgaccattgtcagtggccttctcatgctgctactgttcctgtccgagctgcagtattacctcaccacggaggtgcatcctgagctctacgtggacaagtcgcggggagataaactgaagatcaacatcgatgtactttttccgcacatgccttgtgcctatctgagtattgatgccatggatgtggccggagaacagcagctggatgtggaacacaacctgttcaagcaacgactagataaagatggcatccccgtgagctcagaggctgagcggcatgagcttgggaaagtcgaggtgacggtgtttgaccctgactccctggaccctgatcgctgtgagagctgctatggtgctgaggcagaagatatcaagtgctgtaacacctgtgaagatgtgcgggaggcatatcgccgtagaggctgggccttcaagaacccagatactattgagcagtgccggcgagagggcttcagccagaagatgcaggagcagaagaatgaaggctgccaggtgtatggcttcttggaagtcaataaggtggccggaaacttccactttgcccctgggaagagcttccagcagtcccatgtgcacggtgagtgatctgcactagctggggagatttagatgctggccaccttcttggtgagcttgagtggtcctcttctgcctgctgctcatttgtcttgggcaaccatttggccagagcaggccttcatctcagggcagcagtttggcacagtggctaagagcacaggccgaggagccagactgcctgcattcagataccagtttcagaccttactggctgtgtgactttgagaaggtttcttaatctttttgactcctgttttctactttataaaatgttgatgagggcacttatctcacagggtgtgtgtgcaggttaaagatgatagcacggagcctggcttgtggtaggtacttgttgaaatggtagccccccgtgtccgatgatgacctgtgcatgaggctttgggagaagcagagctaggttggagcacaggttctgccacacctgggctatgtcatatttgggccctatttagttgcttcttctgtaaaatggggatgatgataatagtacccactcacagggctgttggggtgaacaaatgagatttattctcattcatttgttcattcatgcattcacaaaatatttagtaatcacctactagtctagttgctaagggtacagtagtgaacaatctgtgccctcagaacattctagtaaagaaatagacaataagtatataaaatataaatagtccccaattaacaatggttcagcttgcaatttttaacttcatgatgggtattacatgcatttttcacttaacgatattttctttttcttttttgagacagagtctcactctgtcgcccaggctggagtgcagtggcatgatcttgactcactgcaacctccacctcctggattcaagtgattctcctacctcagcctcttgagtagctgggtgtacaggtgc

SEQ ID NO: 10842 - protein, 230 aa, Homo sapiens
MEALGKLKQFDAYPKTLEDFRVKTCGGATVTIVSGLLMLLLFLSELQYYLTTEVHPELYVDKSRGDKLKINIDVLFPHMPCAYLSIDAMDVAGEQQLDVEHNLFKQRLDKDGIPVSSEAERHELGKVEVTVFDPDSLDPDRCESCYGAEAEDIKCCNTCEDVREAYRRRGWAFKNPDTIEQCRREGFSQKMQEQKNEGCQVYGFLEVNKVAGNFHFAPGKSFQQSHVHGE

SEQ ID NO: 10843 - DNA, 1398 bp, Homo sapiens
tggctccaggccggaagagggagtctgtaggggcgggccggctggcgtcccctttccggccggtccccatggaggcgctggggaagctgaagcagttcgatgcctaccccaagactttggaggacttccgggtcaagacctgcgggggcgccaccgtgaccattgtcagtggccttctcatgctgctactgttcctgtccgagctgcagtattacctcaccacggaggtgcatcctgagctctacgtggacaagtcgcggggagataaactgaagatcaacatcgatgtactttttccgcacatgccttgtgcctatctgagtattgatgccatggatgtggccggagaacagcagctggatgtggaacacaacctgttcaagcaacgactagataaagatggcatccccgtgagctcagaggctgagcggcatgagcttgggaaagtcgaggtgacggtgtttgaccctgactccctggaccctgatcgctgtgagagctgctatggtgctgaggcagaagatatcaagtgctgtaacacctgtgaagatgtgcgggaggcatatcgccgtagaggctgggccttcaagaacccagatactattgagcagtgccggcgagagggcttcagccagaagatgcaggagcagaagaatgaaggctgccaggtgtatggcttcttggaagtcaataaggtggccggaaacttccactttgcccctgggaagagcttccagcagtcccatgtgcacgggtgtgtgtgcaggttaaagatgatagcacggagcctggcttgtgtccatgacttgcagagctttggccttgacaacatcaacatgacccactacatccagcacctgtcatttggggaggactatccaggcattgtgaaccccctggaccacaccaatgtcactgcgccccaagcctccatgatgttccagtactttgtgaaggtggtgcccactgtgtacatgaaggtggacggagaggtactgaggacaaatcagttctctgtgaccagacatgagaaggttgccaatgggctgttgggcgaccaaggccttcccggagtcttcgtcctctatgagctctcgcccatgatggtgaagctgacggagaagcacaggtccttcacccacttcctgacaggtgtgtgcgccatcattgggggcatgttcacagtggctggactcatcgattcgctcatctaccactcagcacgagccatccagaagaaaattgatctagggaagacaacgtagtcaccctcggtgcttcctctgtctcctctttctccctggcctgtggttgtcccccagcctctgccaccctccacctcctcggtcagccccagccccaggttgataaatctattgattgattgtgatagtactc

SEQ ID NO: 10844 - protein, 398 aa, Homo sapiens
MEALGKLKQFDAYPKTLEDFRVKTCGGATVTIVSGLLMLLLFLSELQYYLTTEVHPELYVDKSRGDKLKINIDVLFPHMPCAYLSIDAMDVAGEQQLDVEHNLFKQRLDKDGIPVSSEAERHELGKVEVTVFDPDSLDPDRCESCYGAEAEDIKCCNTCEDVREAYRRRGWAFKNPDTIEQCRREGFSQKMQEQKNEGCQVYGFLEVNKVAGNFHFAPGKSFQQSHVHGCVCRLKMIARSLACVHDLQSFGLDNINMTHYIQHLSFGEDYPGIVNPLDHTNVTAPQASMMFQYFVKVVPTVYMKVDGEVLRTNQFSVTRHEKVANGLLGDQGLPGVFVLYELSPMMVKLTEKHRSFTHFLTGVCAIIGGMFTVAGLIDSLIYHSARAIQKKIDLGKTT

SEQ ID NO: 10845 - DNA, 530 bp, Homo sapiens
gccggctggcgtcccctttccggccggtccccatggaggcgctggggaagctgaagcagttcgatgcctaccccaagactttggaggacttccgggtcaagacctgcgggggcgccaccgtgaccattgtcagtggccttctcatgctgctactgttcctgtccgagctgcagtattacctcaccacggagatctgagtattgatgccatggatgtggccggagaacagcagctggatgtggaacacaacctgttcaagcaacgactagataaagatggcatccccgtgagctcagaggctgagcggcatgagcttgggaaagtcgaggtgacggtgtttgaccctgactccctggaccctgatcgctgtgagagctgctatggtgctgaggcagaagatatcaagtgctgtaacacctgtgaagatgtgcgggaggcatatcgccgtagaggctgggccttcaagaacccagatactattgagcagtgccggcgagagggcttcagccagaagatgcaggagcagaaga

SEQ ID NO: 10846 - protein, 106 aa, Homo sapiens
MDVAGEQQLDVEHNLFKQRLDKDGIPVSSEAERHELGKVEVTVFDPDSLDPDRCESCYGAEAEDIKCCNTCEDVREAYRRRGWAFKNPDTIEQCRREGFSQKMQEQ

SEQ ID NO: 10847 - DNA, 2843 bp, Homo sapiens
cccctttccggccggtccccatggaggcgctggggaagctgaagcagttcgatgcctaccccaagactttggaggacttccgggtcaagacctgcgggggcgccaccgtgaccattgtcagtggccttctcatgctgctactgttcctgtccgagctgcagtattacctcaccacggaggtgcatcctgagctctacgtggacaagtcgcggggagataaactgaagatcaacatcgatgtactttttccgcacatgccttgtgcctatctgagtattgatgccatggatgtggccggagaacagcagctggatgtggaacacaacctgttcaagcaacgactagataaagatggcatccccgtgagctcagaggctgagcggcatggtaaccaggggagggggccgggtctcagatcccaaagctggatgtacccaagcctatctgctagcaagtgaactgtggcaggcatagtgatacattaaacaactaagagctagagaagtcaagtgacttgcctagggtcccccagctagtaagagtcagagtgagctaaaatcctctatacatatcgagtcaggtaatctacctggctattattctcagaggtcctcaatacctgcagatggtagtttgaataccagaggtttgaagataggtcttatgtgctcttgccttggtagaactgtctagatggacccaggcttctttgagtgtttgctttcccagcccattggcttaattcagcccttaatgctcttcccctttggaatgcaggtggtttaatgagaatttaggttctcaagtcagattgcctgggttcacatctagctttgtctcctgcagtctgtgagcttcagctagaaagtggtaataaaacagtagtaccaaccacatggaattgtaagatcaaatgaagtcatatgtgtaaaatgcctggtacagagtgggtacccacttttaccttcctttcctttatcttggtggcttcccaattcccttcgttaactcagtttcccaccacagcaaactgtcctcaaagctgggatttctaacaccttagagattactctggtggggagttttatcattcgttgtttcagcagattaatgcaggacaccagtggaaccaacataatttgctataggactggatgtggagtggaggagagcaaagtcatggttgttgattccaacgctttcagcctgagcaaatgaatgacttgagatggagatgactggaggagaaggtttttttggtgggagggaggagtggctattggatatccactgctgtgtaacaaagtactccaaaagttagtagtttgatacaataaaaatgtgttttttcagtttccctgggtcaggaatttaggagtggcttgtttgggtgattcgggattagggtatctcacgaggttgcagtcatctaaggattgatggggcactgaagaatctactatctatctatctatctatctatctatctatctatctatctatctgtctatcttgagacagagtctcactttgtcgcccaggctggagtgcagtggcgcgatcttggctcactgcaacctccgcctcccaggttcaagtgattctcctgcctcaacctcccgagtagctgggattacaggcctgtgccaccatgcccagctaattttttgtatttttagtagagacggggttgcaccttgttgggccagatggtcttgatctcttgaccttgtgatccacccgcctcagccttccaaagtgctgggattacaggcatgagccactgcgcctggcctacttatttgttgtttaaatttattttttttctgtcaaggtgttctttatttcagagagagggcaggacagggggctcagtctttcttggcatcagctttcctcatgatggctgggacattgctcagctcctcctgcctcctcttagtgcggatgtgcgtccccactcttttcttgatgaacttgagggcccgtttgtccttggagaccttgagtaacaccatggcgtgccgctcatacggggcgaaaccacacacctctcggatcatgtcccacatgaatttggtgtttggtcaggcgcccgcggcggcagctgtgcctgggcttgctcatgttcttggtcatcttgtggcccttgtcaaggcacacggccatagtgggtagcacagagccatggctgctgctctccaatggcagctgtggcagaagggctggtgccacgcggggatctactttttttttttttttttttttttttttgagtcacgctctgtcacccaggctggagtgcaatggtgcgatttcagctcactgcaacctctgcctcccggcttcaagtgattcacctgcctcagccttctgagtagctggggttacaggcgcctgcccccacacccggctactttttgtatttttggtagagacagggtttcaccatcgtggccaggctggtctcaaactcctgacctcaggtgatccacccgccttggcctcccaaagtgttgggattacaggcatgggccaccacgcccagcaggggatctgcttttaaagggctcactcatagggctgttggcaggatgcctcagtgcctcaccacatgggcctctcagtagggttgcttgtgtgtccttgtatcacggcaactggcttcccccacttggatcttgcaagtgagctgagagaacaaagtagaaaccataacctttggccaggcatggtggctcacgcctgtagtcccagcacttttggaggctgaggcagttggatcacctgaagtcaggagttcaagaccagcctggccaacatggtaaaaccccatctctact

SEQ ID NO: 10848 - protein, 145 aa, Homo sapiens
MEALGKLKQFDAYPKTLEDFRVKTCGGATVTIVSGLLMLLLFLSELQYYLTTEVHPELYVDKSRGDKLKINIDVLFPHMPCAYLSIDAMDVAGEQQLDVEHNLFKQRLDKDGIPVSSEAERHGNQGRGPGLRSQSWMYPSLSASK

SEQ ID NO: 10849 - DNA, 720 bp, Homo sapiens
tttccggccggtccccatggaggcgctggggaagctgaagcagttcgatgcctaccccaagactttggaggacttccgggtcaagacctgcgggggcgccaccgtgaccattgtcagtggccttctcatgctgctactgttcctgtccgagctgcagtattacccactacatccagcacctgtcatttggggaggactatccaggcattgtgaaccccctggaccacaccaatgtcactgcgccccaagcctccatgatgttccagtactttgtgaaggtggtgcccactgtgtacatgaaggtggacggagaggtactgaggacaaatcagttctctgtgaccagacatgagaaggttgccaatgggctgttgggcgaccaaggccttcccggagtcttcgtcctctatgagctctcgcccatgatggtgaagctgacggagaagcacaggtccttcacccacttcctgacaggtgtgtgcgccatcattgggggcatgttcacagtggctggactcatcgattcgctcatctaccactcagcacgagccatccagaagaaaattgatctagggaagacaacgtagtcaccctcggtgcttcctctgtctcctctttctccctggcctgtggttgtcccccagcctctgccaccctccacctcctcggtcagccccagccccaggttgataaatctattgattgattgtgatagtactc

SEQ ID NO: 10850 - protein, 111 aa, Homo sapiens
MEALGKLKQFDAYPKTLEDFRVKTCGGATVTIVSGLLMLLLFLSELQYYPLHPAPVIWGGLSRHCEPPGPHQCHCAPSLHDVPVLCEGGAHCVHEGGRRGTEDKSVLCDQT

SEQ ID NO: 10851 - DNA, 829 bp, Homo sapiens
ggggaagctgaagcagttcgatgcctaccccaagactttggaggacttccgggtcaagacctgcgggggcgccaccgtgaccattgtcagtggccttctcatagctgctatggtgctgaggcagaagatatcaagtgctgtaacacctgtgaagatgtgcgggaggcatatcgccgtagaggctgggccttcaagaacccagatactattgagcagtgccggcgagagggcttcagccagaagatgcaggagcagaagaatgaaggctgccaggtgtatggcttcttggaagtcaataaggtggccggaaacttccactttgcccctgggaagagcttccagcagtcccatgtgcacgtccatgacttgcagagctttggccttgacaacatcaacatgacccactacatccagcacctgtcatttggggaggactatccaggcattgtgaaccccctggaccacaccaatgtcactgcgccccaagcctccatgatgttccagtactttgtgaaggtggtgcccactgtgtacatgaaggtggacggagaggtactgaggacaaatcagttctctgtgaccagacatgagaaggttgccaatgggctgttgggcgaccaaggccttcccggagtcttcctcatctaccactcagcacgagccatccagaagaaaattgatctagggaagacaacgtagtcaccctcggtgcttcctctgtctcctctttctccctggcctgtggttgtcccccagcctctgccaccctccacctcctcggtcagccccagccccaggttgataaatctattgattgattgtgatagta

SEQ ID NO: 10852 - protein, 151 aa, Homo sapiens
MQEQKNEGCQVYGFLEVNKVAGNFHFAPGKSFQQSHVHVHDLQSFGLDNINMTHYIQHLSFGEDYPGIVNPLDHTNVTAPQASMMFQYFVKVVPTVYMKVDGEVLRTNQFSVTRHEKVANGLLGDQGLPGVFLIYHSARAIQKKIDLGKTT

SEQ ID NO: 10853 - DNA, 1312 bp, Homo sapiens
tggaattagctgaaatctgtttcctcggttgcattgggcaaagtcacttctcatcagtgagcctcaacatcttctcagtaaaacagggataattaccgccaccctcaaagagtcattgtggggatgaaatgagatgatggttgtgaagtacagtgatctgtacacagctaatgttcagtatttactgttgactgttttcttactgtttcttttattaaaagaattgatatgtgtgtagaagtgcttaatgcctgacccgtagcatgtactatatgaatattagttattataacttttattatccctaagcaaagggcttgtgcagactggagccaccgatttcactgtgtctggccccagctgatgcctctgcttctcccctccccttagagcttgggaaagtcgaggtgacggtgtttgaccctgactccctggaccctgatcgctgtgagagctgctatggtgctgaggcagaagatatcaagtgctgtaacacctgtgaagatgtgcgggaggcatatcgccgtagaggctgggccttcaagaacccagatactattgagcagtgccggcgagagggcttcagccagaagatgcaggagcagaagaatgaaggctgccaggtgtatggcttcttggaagtcaataaggtggccggaaacttccactttgcccctgggaagagcttccagcagtcccatgtgcacggtgagtgatctgcactagctggggagatttagatgctggccaccttcttggtgagcttgagtggtcctcttctgcctgctgctcatttgtcttgggcaaccatttggccagagcaggccttcatctcagggcagcagtttggcacagtggctaagagcacaggccgaggagccagactgcctgcattcagataccagtttcagaccttactggctgtgtgactttgagaaggtttcttaatctttttgactcctgttttctactttataaaatgttgatgagggcacttatctcacagggtgtgtgtgcaggttaaagatgatagcacggagcctggcttgtggtaggtacttgttgaaatggtagccccccgtgtccgatgatgacctgtgcatgaggctttgggagaagcagagctaggttggagcacaggttctgccacacctgggctatgtcatatttgggccctatttagttgcttcttctgtaaaatggggatgatgataatagtacccactcacagggctgttggggtgaacaaatgagatttattctcattcatttgttcattcatgcattcacaaaatatttagtaatcacctac

SEQ ID NO: 10854 - protein, 88 aa, Homo sapiens
MVLRQKISSAVTPVKMCGRHIAVEAGPSRTQILLSSAGERASARRCRSRRMKAARCMASWKSIRWPETSTLPLGRASSSPMCTVSDLH

SEQ ID NO: 10855 - DNA, 971 bp, Homo sapiens
cagggtctgttctaaagactcctgaggagggcgtgaactctcacacaggcccaaggcttgccctttctggctgtccttaagcaggaccaggaggtgccaggctggagaaggaatgaggggcagagaagacaggtggtttgcagtccagggggaggaaggaggaggccagtgctgctcctactaatgacgccttctcccttgccttctcccttctctcctagtccatgacttgcagagctttggccttgacaaccctccatgatgttccagtactttgtgaaggtggtgcccactgtgtacatgaaggtggacggagaggtgagtcagggagctccctaccagagtctcctgcgcggtgccaagcactggagttcctgcattttgttccgtcagcctggggagtgaaagctgcctcgtcctcacatggcgaataaaagactgaggcacagagagggtgggggatttgccctcccaggcagagtgcaggcctggggctgttagatttaaagcgcctgctctttctgctgccctcaccgcttctatccgttcctccggtgcccaccgtctgcctgcctcactgttctctgtggtctgcctgggctgggggttaggcaaggcaagtctctgtgtacccgctcccaaggctgccctggcctgtggagcagcatctcagcagagtggcaggatgcgaggggctgagggcagaggaagtcaggtcagccttggtgcgtctttggagagctgcttctcagcctggacccccgtgagaacacccaccaaatgctgccaggataggtaaactgtaaagacttggcacctggaggggaaggctgaggccaagactaggagagggggtctggcgggccaggccttgcagtgcaggccactagcacggtgctgtgttctctccttacacggccaaggctcaacaggaaaggggaaggagcaggggtggggctgatggtggctgg

SEQ ID NO: 10856 - protein, 69 aa, Homo sapiens
MTCRALALTTLHDVPVLCEGGAHCVHEGGRRGESGSSLPESPARCQALEFLHFVPSAWGVKAASSSHGE

SEQ ID NO: 10857 - DNA, 606 bp, Homo sapiens
cagagctttggatgagctctggatggtgttgtttacagatcaacatgacccactacatccagcacctgtcatttggggaggactatccaggcattgtgaaccccctggaccacaccaatgtcactgcgccccaagcctccatgatgttccagtactttgtgaaggtggtgcccactgtgtacatgaaggtggacggagaggtactgaggacaaatcagttctctgtgaccagacatgagaaggttgccaatgggctgttgggcgaccaaggccttcccggagtcttcgtcctctatgagctctcgcccatgatggtgaagctgacggagaagcacaggtccttcacccacttcctgacaggtgtgtgcgccatcattgggggcatgttcacagtggctggactcatcgattcgctcatctaccactcagcacgagccatccagaagaaaattgatctagggaagacaacgtagtcaccctcggtgcttcctctgtctcctctttctccctggcctgtggttgtcccccagcctctgccaccctccacctcctcggtcagccccagccccaggttgataaatctattgattgattgtgatagtactc

SEQ ID NO: 10858 - protein, 153 aa, Homo sapiens
MSSGWCCLQINMTHYIQHLSFGEDYPGIVNPLDHTNVTAPQASMMFQYFVKVVPTVYMKVDGEVLRTNQFSVTRHEKVANGLLGDQGLPGVFVLYELSPMMVKLTEKHRSFTHFLTGVCAIIGGMFTVAGLIDSLIYHSARAIQKKIDLGKTT

SEQ ID NO: 10859 - DNA, 548 bp, Homo sapiens
gctgcctcgtcctcacatggcgaataaaagactgaggcacagagagggtgggggatttgccctcccaggcagagtgcaggcctggggctgttagatttaaagcgcctgctctttctgctgccctcaccgcttctatccgttcctccggtgcccaccgtctgcctgcctcactgttctctgtggtctgcctgggctgggggttaggcaaggcaagtctctgtgtacccgctcccaaggctgccctggcctgtggagcagcatctcagcagagtggcaggatgcgaggggctgagggcagaggaagtcaggtcagccttggtgcgtctttggagagctgcttctcagcctggacccccgtgagaacacccaccaaatgctgccaggataggtactgaggacaaatcagttctctgtgaccagacatgagaaggttgccaatgggctgttgggcgaccaaggccttcccggagtcttcgtccttctgtctcctctttctccctggcctgtggttgtcccccagcctctgccaccctccacctcctcggtca

SEQ ID NO: 10860 - protein, 41 aa, Homo sapiens
MRRLPMGCWATKAFPESSSFCLLFLPGLWLSPSLCHPPPPR

SEQ ID NO: 10861 - DNA, 1018 bp, Homo sapiens
gctgcctcgtcctcacatggcgaataaaagactgaggcacagagagggtgggggatttgccctcccaggcagagtgcaggcctggggctgttagatttaaagcgcctgctctttctgctgccctcaccgcttctatccgttcctccggtgcccaccgtctgcctgcctcactgttctctgtggtctgcctgggctgggggttaggcaaggcaagtctctgtgtacccgctcccaaggctgccctggcctgtggagcagcatctcagcagagtggcaggatgcgaggggctgagggcagaggaagtcaggtcagccttggtgcgtctttggagagctgcttctcagcctggacccccgtgagaacacccaccaaatgctgccaggataggtaaactgtaaagacttggcacctggaggggaaggctgaggccaagactaggagagggggtctggcgggccaggccttgcagtgcaggccactagcacggtgctgtgttctctccttacacggccaaggctcaacaggaaaggggaaggagcaggggtggggctgatggtggctggagccaggtcctagccctagccctggcccaggctcccctcccaccccaggtactgaggacaaatcagttctctgtgaccagacatgagaaggttgccaatgggctgttgggcgaccaaggccttcccggagtcttcgtcctctatgagctctcgcccatgatggtgaagctgacggagaagcacaggtccttcacccacttcctgacaggtgtgtgcgccatcattgggggcatgttcacagtggctggactcatcgattcgctcatctaccactcagcacgagccatccagaagaaaattgatctagggaagacaacgtagtcaccctcggtgcttcctctgtctcctctttctccctggcctgtggttgtcccccagcctctgccaccctccacctcctcggtcagccccagccccaggttgataaatctattgattgattgtgatagtactc

SEQ ID NO: 10862 - protein, 54 aa, Homo sapiens
MMVKLTEKHRSFTHFLTGVCAIIGGMFTVAGLIDSLIYHSARAIQKKIDLGKTT

SEQ ID NO: 10863 - DNA, 794 bp, Homo sapiens
gctgcctcgtcctcacatggcgaataaaagactgaggcacagagagggtgggggatttgccctcccaggcagagtgcaggcctggggctgttagatttaaagcgcctgctctttctgctgccctcaccgcttctatccgttcctccggtgcccaccgtctgcctgcctcactgttctctgtggtctgcctgggctgggggttaggcaaggcaagtctctgtgtacccgctcccaaggctgccctggcctgtggagcagcatctcagcagagtggcaggatgcgaggggctgagggcagaggaagtcaggtcagccttggtgcgtctttggagagctgcttctcagcctggacccccgtgagaacacccaccaaatgctgccaggataggtactgaggacaaatcagttctctgtgaccagacatgagaaggttgccaatgggctgttgggcgaccaaggccttcccggagtcttcgtcctctatgagctctcgcccatgatggtgaagctgacggagaagcacaggtccttcacccacttcctgacaggtgtgtgcgccatcattgggggcatgttcacagtggctggactcatcgattcgctcatctaccactcagcacgagccatccagaagaaaattgatctagggaagacaacgtagtcaccctcggtgcttcctctgtctcctctttctccctggcctgtggttgtcccccagcctctgccaccctccacctcctcggtcagccccagccccaggttgataaatctattgattgattgtgatagtactc

SEQ ID NO: 10864 - protein, 54 aa, Homo sapiens; identical to SEQ ID NO: 10862

SEQ ID NO: 10865 - DNA, 282 bp, Homo sapiens
ggctgttgggcgaccaaggccttcccggagtcttcgtcctctatgagctcatcattgggggcatgttcacagtggctggactcatcgattcgctcatctaccactcagcacgagccatccagaagaaaattgatctagggaagacaacgtagtcaccctcggtgcttcctctgtctcctctttctccctggcctgtggttgtcccccagcctctgccaccctccacctcctcggtcagccccagccccaggttgataaatctattgattgattgtgatagta

SEQ ID NO: 10866 - protein, 31 aa, Homo sapiens
MSSSLGACSQWLDSSIRSSTTQHEPSRRKLI

SEQ ID NO: 10867 - DNA, 2226 bp, Homo sapiens
aaccgattctatagccaccacagagcaaactgtgggctggcctcccagtatgaagtgtgggtccagcagggcccacaggagccattctgagtttctggccaaacacattcaagctcacattcccttttgtgtctccagatcctatgatttcatggaaggggaccctcccacccaccgccactgccaaccaagacatagctcagtggtcaagacttgggcttgggagtcgggatcctgtaacgaatgtcacttgaccgctttctttttttatgaaacagtctcgctctgtctcccaggttggagtgcagtggcacgatctcggctgactgcaacctccacctcctgggttcaagcgattctcctgcctcagcctccccagtagctgggattacaggcgtgggcccccatgtccagctaatttttatattttcgctctgtctcccaggttggagtgcagtggcacgatctcggctgactgcaacctccacctcctgggttcaagcgattctcctgcctcagcctccccagtagctgggattacaggcgtgggcccccatgtccagctaatttttatatttttagtagagacagggtttcaccatgttgtccaggctggtcttgaacccctgacctcaagtgatccacccacctctgcctcccaaagtgctgggattacaggtgtgagccaccatgccaggccctcttaacctcttcaagtctgttttctcatctgcaaaacagaggtaataagatcagtatcttcttaatggaagcacctggactacatttttttcattcattgttatcataaatgaggactaacctgtctcccgttgggagttttgaacctagacctcatgtcttcatgacgtcatcactgccccaggcccagctgtgtccctacaccagccccagctgacgcatcttctttttctgcctgtagagatggttacaatgcctggcgtgatgcattctggccttcgcagatcctggcggggctgtgccaacgctgtggcctccctgcccctgaataccgagccggtgctgtcaaggtgggcagcaaagtcttcctgacaccaccggagaccctgcccccagggatctcttcacatgtggattgacatctttcctcaagatgtgcctgctccacccccagttgacatcaagcctcggcagccaatcagctatgagctcagagttgtcatctggaacacggaggatgtggttctggatgacgagaatccactcaccggagagatgtcgagtgacatctatgtgaagagctgggtgaaggggttggagcatgacaagcaggagacagacgttcacttcaactccctgactggggaggggaacttcaattggcgctttgtgttccgctttgactacctgcccacggagcgggaggtgagcgtctggcgcaggtctggaccctttgccctggaggaggcggagttccggcagcctgcagtgctggtcctgcaggtctgggactatgaccgcatctctgccaatgacttccttggatccctggagttgcagctaccagacatggtgcgtggggcccggggccccgagctctgctctgtgcagctggcccgcaatggggccgggccgaggtgcaatctgtttcgctgccgccgcctgaggggctggtggccggtagtgaagctgaaggaggcagaggacgtggagcgggaggcgcaggaggctcaggctggcaagaagaagcgaaagcagaggaggaggaagggccggccagaagacctggagttcacagacatgggtggcaatgtgtacatcctcacgggcaaggtggaggcagagtttgagctgctgactgtggaggaggccgagaaacggccagtggggaaggggcggaagcagccagagcctctggagaaacccagccgccccaaaacttccttcaactggtttgtgaacccgctgaagacctttgtcttcttcatctggcgccggtactggcgcaccctggtgctgctgctactggtgctgctcaccgtcttcctcctcctggtcttctacaccatccctggccagatcagccaggtcatcttccgtcccctccacaagtgactctcgctgaccttggacactcacccagggtgccaacccttcaatgcctgctcctggaagtctttcttacccatgtgagctaccccagagtctagtgcttcctctgaataaacctatcacagccactga

SEQ ID NO: 10868 - protein, 328 aa, Homo sapiens [sequence omitted]

SEQ ID NO: 10869 - DNA, 3600 bp, Homo sapiens
ggaccctgggcagccggagagctcattgccgcctttcaactcattgaactagactacagtggccgacttgaggtcagcatgccctggcgtggctagcacaggctgtgagcccaacttgttagtccatcaggccatccagccctagggaatataaaacatggatatgtcccaggaccagcctccaggtctcttttccccagagaataaagactgcaggtttgtcctgaggtcacctcattggaccacttgaccccaaggaacattgcaagtattcatgtgctaggttcaccttgttgggccatcctgcatgcctcagacaccctgctcccttcctgcacgaagctgcttcccgagaccccctcccttccaccaatccagccttggttggttcctgtgcatttacatttcaccagtacctctccatatcccctccccacacctaggcttttcctcctttggcctgattcctcttcgccctctgactgtttccctcctacagccctcagtgcccagtgaggtggagccccaggatctggcacccctggttgagccccactctggacgcctgtcccttccacccaacgtgtgcccagtgctcagggagttccgtgttgaggtgctgttctggggtcttaggggacttggtcgtgtgcatctgctcgaggtggagcagccccaggttgtactggaggtggctgggcaaggtgtggagtctgaggtcctggccagctaccgtgagagccccaatttcactgagcttgtcaggcatctgacagtggacttgccggagcagccttacttgcagcctccactcagcatcttggtgattgagcgccgggcctttggccacacagtccttgtgggttcccacattgtcccccacatgctgcgattcacatttcggggtcatgaggatcctcctgaggaggaaggagagatggaggagacaggggatatgatgcccaagggacctcaaggacagaagtccctggatcccttcttggctgaagcgggtatatccagacagctcctgaagcctcctctgaagaagctcccactaggaggcctcctaaatcaaggccctgggctggaggaagacatcccagatccagaggagctcgactgggggtccaagtactatgcgtcgctgcaggagctccaggggcagcacaactttgatgaagatgaaatggatgatcctggagattcagatggggtcaacctcatttctatggttggggagatccaagaccaggatctacaacaggtccctgaaggaagaatttaaccactttgaagactggctgaatgtgtttcctctgtaccgagggcaagggggccaggatggaggtggagaagaggaaggatctggacaccttgtgggcaagttcaagggctccttcctcatttaccctgaatcagaggcagtgttgttctctgagccccagatctcccgggggatcccacagaaccggcccatcaagctcctggtcagagtgtatgttgtaaaggctaccaacctggctcctgcagaccccaatggcaaagcagacccttacgtggtggtgagcgctggccgggagcggcaggacaccaaggaacgctacatccccaagcagctcaaccccatctttggagagatcctggagctaagcatctctctcccagctgagacggagctgacggtcgccgtatttgatcatgacctcgtgggttctgacgacctcatcggggagacccacattgatctggaaaaccgattctatagccaccacagagcaaactgtgggctggcctcccagtatgaagtgtgggtccagcagggcccacaggagccattctgagtttctggccaaacacattcaagctcacattcccttttgtgtctccagatcctatgatttcatggaaggggaccctcccacccaccgccactgccaaccaagacatagctcagtggtcaagacttaagcacctggactacatttttttcattcattgttatcataaatgaggactaacctgtctcccgttgggagttttgaacctagacctcatgtcttcatgacgtcatcactgccccaggcccagctgtgtccctacaccagccccagctgacgcatcttctttttctgcctgtagagatggttacaatgcctggcgtgatgcattctggccttcgcagatcctggcggggctgtgccaacgctgtggcctccctgcccctgaataccgagccggtgctgtcaaggtgggcagcaaagtcttcctgacaccaccggagaccctgcccccagggatctcttcacatgtggattgacatctttcctcaagatgtgcctgctccacccccagttgacatcaagcctcggcagccaatcagctatgagctcagagttgtcatctggaacacggaggatgtggttctggatgacgagaatccactcaccggagagatgtcgagtgacatctatgtgaagaggtaggctgctggccgggcggggcaacggcggtgcactagggggattgcaaatgggtgtgggccctcgggctgagtccagagccccgaccccaggccctccgtggtgctgagagcggggtgaggagtgggttctccatgtagctccagccctgacgctcacccaccccggccccagctgggtgaaggggttggagcatgacaagcaggagacagacgttcacttcaactccctgactggggaggggaacttcaattggcgctttgtgttccgctttgactacctgcccacggagcgggaggtgagcgtctggcgcaggtctggaccctttgccctggaggaggcggagttccggcagcctgcagtgctggtcctgcaggtctgggactatgaccgcatctctgccaatgacttccttggatccctggagttgcagctaccagacatggtgcgtggggcccggggccccgagctctgctctgtgcagctggcccgcaatggggccgggccgaggtgcaatctgtttcgctgccgccgcctgaggggctggtggccggtagtgaagctgaaggaggcagaggacgtggagcgggaggcgcaggaggctcaggctggcaagaagaagcgaaagcagaggaggaggaagggccggccagaagacctggagttcacagacatgggtggcaatgtgtacatcctcacgggcaaggtggaggcagagtttgagctgctgactgtggaggaggccgagaaacggccagtggggaaggggcggaagcagccagagcctctggagaaacccagccgccccaaaacttccttcaactggtttgtgaacccgctgaagacctttgtcttcttcatctggcgccggtactggcgcaccctggtgctgctgctactggtgctgctcaccgtcttcctcctcctggtcttctacaccatccctggccagatcagccaggtcatcttccgtcccctccacaagtgactctcgctgaccttggacactcacccagggtgccaacccttcaatgcctgctcctggaagtctttcttacccatgtgagctaccccagagtctagtgcttcctctgaataaacctatcacagccactga

SEQ ID NO: 10870 - protein, 326 aa, Homo sapiens
MPQTPCSLPARSCFPRPPPFHQSSLGWFLCIYISPVPLHIPSPHLGFSSFGLIPLRPLTVSLLQPSVPSEVEPQDLAPLVEPHSGRLSLPPNVCPVLREFRVEVLFWGLRGLGRVHLLEVEQPQVVLEVAGQGVESEVLASYRESPNFTELVRHLTVDLPEQPYLQPPLSILVIERRAFGHTVLVGSHIVPHMLRFTFRGHEDPPEEEGEMEETGDMMPKGPQGQKSLDPFLAEAGISRQLLKPPLKKLPLGGLLNQGPGLEEDIPDPEELDWGSKYYASLQELQGQHNFDEDEMDDPGDSDGVNLISMVGEIQDQDLQQVPEGRI

SEQ ID NO: 10871 - DNA, 4935 bp, Homo sapiens
ccgcccccagggctcaggctgcgtcccccgaggccgggctcccgcgatttccagctccttggggcgctgagctgttttggaggcgccccaggtcgtgttccacagcggcgcgtccgcagctgctggccaacttcttccgtttcagagcggcttagcccccctcccctgccctcacccccgaatacttggaggagatcagggtgaggtgcagagatttaccagcactcgccctccccacgctcccctccaacacgcttctcttgttccccacagcggggtttaaccctaccttcggcccggcctgggtgcccctctatggctcgccccccggcgcggggctccgggatagtcttcaaggtctcaacgaaggcgttggccaaggcatttggttccgcggccgccttctgctggctgtgtccatgcaggtgttggaagggagagctgaacctgagcctccccaggcccagcaggggtccacgttgtcccggctcacccgaaagaagaaaaagaaagccagaagggatcagaccccaaaggcggttccgcagcacttggacgccagccccggtgccgaggggcctgagatcccccgtgccatggaggtggaggtggaggagctgctgccgctgccagagaatgtcctggcgccctgtgaagatttcctgcttttcggtgtgctcttcgaggccaccatgatcgaccccaccgtggcctcccagcccatcagcttcgagatctccattggtcgcgcaggccgtctggaggagcaattgggccgagggtccagggctggggagggaactgagggtgcagccgtggaggctcagcctctgctgggagccaggccagaggaggagaaagaggaggaagaactggggacccatgctcagcggcctgagcccatggacggcagtgggccatacttctgcttgcccctctgtcactgcaagccatgcatgcatgtgtggagttgctgggaggaccacacctggcgcctgcagagcagcaactgcgtgcgcaaagtggccgagaggctggaccaggggctgcaggaggttgagagactgcagcgcaagccggggcctggcgcctgtgcacagctcaagcaggcactggaagtactggtggctgggagcagacagttttgccacggtgccgagcgcaggacgatgacccggcccaatgccctggatcgatgccgagggaaactcctggtgcacagcctgaaccttttggctaagcaaggactgcgacttctacgcggcctgagacggcgcaatgtgcaaaagaaggtggcactggccaagaagctcctggcaaaactgcgctttctggctgaggagcacaactttgatgaagatgaaatggatgatcctggagattcagatggggtcaacctcatttctatggttggggagatccaagaccagggtgaggctgaagtcaaaggcactgtgtccccaaaaaaagcagttgccaccctgaagatctacaacaggtccctgaaggaagaatttaaccactttgaagactggctgaatgtgtttcctctgtaccgagggcaagggggccaggatggaggtggagaagaggaaggatctggacaccttgtgggcaagttcaagggctccttcctcatttaccctgaatcagaggcagtgttgttctctgagccccagatctcccgggggatcccacagaaccggcccatcaagctcctggtcagagtgtatgttgtaaagctaagaaacctttgcaaaatccaaggtcatgaagacttttgcctgttttctgctgctaccaacctggctcctgcagaccccaatggcaaagcagacccttacgtggtggtgagcgctggccgggagcggcaggacaccaaggaacgctacatccccaagcagctcaaccccatctttggagagatcctggagctaagcatctctctcccagctgagacggagctgacggtcgccgtatttgatcatgacctcgtgggttctgacgacctcatcggggagacccacattgatctggaaaaccgattctatagccaccacagagcaaactgtgggctggcctcccagtatgaagtgtgggtccagcagggcccacaggagccattctgagtttctggccaaacacattcaagctcacattcccttttgtgtctccagatcctatgatttcatggaaggggaccctcccacccaccgccactgccaaccaagacatagctcagtggtcaagacttgggcttgggagtcgggatcctgtaacgaatgtcacttgaccgctttctttttttatgaaacagtctcgctctgtctcccaggttggagtgcagtggcacgatctcggctgactgcaacctccacctcctgggttcaagcgattctcctgcctcagcctccccagtagctgggattacaggcgtgggcccccatgtccagctaatttttatattttcgctctgtctcccaggttggagtgcagtggcacgatctcggctgactgcaacctccacctcctgggttcaagcgattctcctgcctcagcctccccagtagctgggattacaggcgtgggcccccatgtccagctaatttttatatttttagtagagacagggtttcaccatgttgtccaggctggtcttgaacccctgacctcaagtgatccacccacctctgcctcccaaagtgctgggattacaggtgtgagccaccatgccaggccctcttaacctcttcaagtctgttttctcatctgcaaaacagaggtaataagatcagtatcttcttaatggaagcacctggactacatttttttcattcattgttatcataaatgaggactaacctgtctcccgttgggagttttgaacctagacctcatgtcttcatgacgtcatcactgccccaggcccagctgtgtccctacaccagccccagctgacgcatcttctttttctgcctgtagagatggttacaatgcctggcgtgatgcattctggccttcgcagatcctggcggggctgtgccaacgctgtggcctccctgcccctgaataccgagccggtgctgtcaaggtgggcagcaaagtcttcctgacaccaccggagaccctgcccccagggatctcttcacatgtggattgacatctttcctcaagatgtgcctgctccacccccagttgacatcaagcctcggcagccaatcagctatgagctcagagttgtcatctggaacacggaggatgtggttctggatgacgagaatccactcaccggagagatgtcgagtgacatctatgtgaagaggtaggctgctggccgggcggggcaacggcggtgcactagggggattgcaaatgggtgtgggccctcgggctgagtccagagccccgaccccaggccctccgtggtgctgagagcggggtgaggagtgggttctccatgtagctccagccctgacgctcacccaccccggccccagctgggtgaaggggttggagcatgacaagcaggagacagacgttcacttcaactccctgactggggaggggaacttcaattggcgctttgtgttccgctttgactacctgcccacggagcgggaggtgagcgtctggcgcaggtctggaccctttgccctggaggaggcggagttccggcagcctgcagtgctggtcctgcaggtctgggactatgaccgcatctctgccaatgacttccttggtattacaatgcttagccttccccaccctcagcccctgcctccagccctcacctccgcccctgcctccagccctcacttccgtcccccagttccctactctgacccaaccttgaatcttgggattttggacccgaggtgtgaaacctttgctttctggcctaattactgagttaattaggcctagaccacagtaacctccattcccacccagagtctctgattcaactctgatttgaccctagcttgtcaccctgacaccgactccacagcctttggtccttggcactctgatcccgacccttggccctcttccactgggaagtagcaatgggtggaccgctgggctgtggtctgggtggtctatagctgtggcctgaccgcacactgcaacaactttcaatgccccaatttacaaccttggtgtgttgcctcctcacccctggcacaatgagactttgatcccatgcctaatctggtgtgctctggacttgcaggatccctggagttgcagctaccagacatggtgcgtggggcccggggccccgagctctgctctgtgcagctggcccgcaatggggccgggccgaggtgcaatctgtttcgctgccgccgcctgaggggctggtggccggtagtgaagctgaaggaggcagaggacgtggagcgggaggcgcaggaggctcaggctggcaagaagaagcgaaagcagaggaggaggaagggccggccagaagacctggagttcacagacatgggtggcaatgtgtacatcctcacgggcaaggtggaggcagagtttgagctgctgactgtggaggaggccgagaaacggccagtggggaaggggcggaagcagccagagcctctggagaaacccagccgccccaaaacttccttcaactggtttgtgaacccgctgaagacctttgtcttcttcatctggcgccggtactggcgcaccctggtgctgctgctactggtgctgctcaccgtcttcctcctcctggtcttctacaccatccctggccagatcagccaggtcatcttccgtcccctccacaagtgactctcgctgaccttggacactcacccagggtgccaacccttcaatgcctgctcctggaagtctttcttacccatgtgagctaccccagagtctagtgcttcctctgaataaacctatcacagccactga

SEQ ID NO: 10872 - protein, 569 aa, Homo sapiens
MQVLEGRAEPEPPQAQQGSTLSRLTRKKKKKARRDQTPKAVPQHLDASPGAEGPEIPRAMEVEVEELLPLPENVLAPCEDFLLFGVLFEATMIDPTVASQPISFEISIGRAGRLEEQLGRGSRAGEGTEGAAVEAQPLLGARPEEEKEEEELGTHAQRPEPMDGSGPYFCLPLCHCKPCMHVWSCWEDHTWRLQSSNCVRKVAERLDQGLQEVERLQRKPGPGACAQLKQALEVLVAGSRQFCHGAERRTMTRPNALDRCRGKLLVHSLNLLAKQGLRLLRGLRRRNVQKKVALAKKLLAKLRFLAEEHNFDEDEMDDPGDSDGVNLISMVGEIQDQGEAEVKGTVSPKKAVATLKIYNRSLKEEFNHFEDWLNVFPLYRGQGGQDGGGEEEGSGHLVGKFKGSFLIYPESEAVLFSEPQISRGIPQNRPIKLLVRVYVVKLRNLCKIQGHEDFCLFSAATNLAPADPNGKADPYVVVSAGRERQDTKERYIPKQLNPIFGEILELSISLPAETELTVAVFDHDLVGSDDLIGETHIDLENRFYSHHRANCGLASQYEVWVQQGPQEPF

SEQ ID NO: 10873 - DNA, 1745 bp, Homo sapiens
tctcggctgactgcaacctccacctcctgggttcaagcgattctcctgcctcagcctccccagtagctgggattacaggcgtgggcccccatgtccagctaatttttatatttttagtagagacagggtttcaccatgttgtccaggctggtcttgaacccctgacctcaagtgatccacccacctctgcctcccaaagtgctgggattacaggtgtgagccaccatgccaggccctcttaacctcttcaagtctgttttctcatctgcaaaacagaggtaataagatcagtatcttcttaatggaagcacctggactacatttttttcattcattgttatcataaatgaggactaacctgtctcccgttgggagttttgaacctagacctcatgtcttcatgacgtcatcactgccccaggcccagctgtgtccctacaccagccccagctgacgcatcttctttttctgcctgtagagatggttacaatgcctggcgtgatgcattctggccttcgcagatcctggcggggctgtgccaacgctgtggcctccctgcccctgaataccgagccggtgctgtcaaggtgggcagcaaagtcttcctgacaccaccggagaccctgcccccagggatctcttcacatgtggattgacatctttcctcaagatgtgcctgctccacccccagttgacatcaagcctcggcagccaatcagctatgagctcagagttgtcatctggaacacggaggatgtggttctggatgacgagaatccactcaccggagagatgtcgagtgacatctatgtgaagaggtaggctgctggccgggcggggcaacggcggtgcactagggggattgcaaatgggtgtgggccctcgggctgagtccagagccccgaccccaggccctccgtggtgctgagagcggggtgaggagtgggttctccatgtagctccagccctgacgctcacccaccccggccccagctgggtgaaggggttggagcatgacaagcaggagacagacgttcacttcaactccctgactggggaggggaacttcaattggcgctttgtgttccgctttgactacctgcccacggagcgggaggtgagcgtctggcgcaggtctggaccctttgccctggaggaggcggagttccggcagcctgcagtgctggtcctgcaggtctgggactatgaccgcatctctgccaatgacttccttggtattacaatgcttagccttccccaccctcagcccctgcctccagccctcacctccgcccctgcctccagccctcacttccgtcccccagttccctactctgacccaaccttgaatcttgggattttggacccgaggtgtgaaacctttgctttctggcctaattactgagttaattaggcctagaccacagtaacctccattcccacccagagtctctgattcaactctgatttgaccctagcttgtcaccctgacaccgactccacagcctttggtccttggcactctgatcccgacccttggccctcttccactgggaagtagcaatgggtggaccgctgggctgtggtctgggtggtctatagctgtggcctgaccgcacactgcaacaactttcaatgccccaatttacaaccttggtgtgttgcctcctcacccctggcacaatgagactttgatcccatgcctaatctggtgtgctctggacttgcaggatccctggagttgc

SEQ ID NO: 10874 - protein, 58 aa, Homo sapiens [sequence omitted]

SEQ ID NO: 10875 - DNA, 260 bp, Homo sapiens
tactgggaagaggaaagtctcctttggattctggacatcgggctgttgctgaagtccttgccttttagatctacaacaggtccctgaaggaagaatttaaccactttgaagactggctgaatgtgtttcctctgtaccgagggcaagggggccaggatggaggtggagaagaggaaggatctggacaccttgtgggcaagttcaagggctccttcctcatttaccctgaatcagaggcagtgttgttctctgagccccag

SEQ ID NO: 10876 - protein, 45 aa, Homo sapiens
MCFLCTEGKGARMEVEKRKDLDTLWASSRAPSSFTLNQRQCCSLS

SEQ ID NO: 10877 - DNA, 2508 bp, Homo sapiens
atggatcagcttccccagaagaatctcctgcgactacaccctgctggctctgctggctgttccactggagtggagagctccagcatggatggcttttggatggaggtggaacagatccaacagagagatgagctgagggaagaggacagtggcgggaatgaaggccagcttccagaggaaggggaagctgaatcccagtggctgcaggacacaggcctgtcgggcctccttggtggcctgggcttggatggtgatcaccaggagctcctgtccaccctgacacagacccaggtggccgctgtgtgccgccggctggacatctatgctcgctcagtgcgaagacaacacaagacacctgtcagagatgtcagggatgtctttggggtcttcaattcagggaaaatgtcgtcagagaatggcgactccggtatgaagggggcccagctcagttccggggcctctaagtttcctccagcagcagagcctggggggctgcaggagcaggctgggagggaagaagccttcaacatggactctgcctactcagaacaagctgcggtgctcctgcagaggagcaggccatcccggggaggcacctctgcctggggcaagtgttccctgccgaagtttaccgtccccaaaggcagacttggcgtgacgaggataggagacttgtccctgcaggatatgaggaaggtaccttctctggccctcatagagctgaccgcgctctgtgacatcctcggcttggacctgaagaggagcaaggcggggaagtggaaagcggcagaaactcgcctctttggtgtgccccttgacagcctgctagaagctgaccacaaagtcctccccagcacacaggtcccgctggtccttcaagccctgctgtcctgtttggaaaagagaggactggacatggaaggcattctcagggtgcccggatcccaggccagggtcaaggggctggaacagaaactggagagagacttctatgctggcctttttagctgggacgaggttcatcacaatgacgcctctgatttgctcaaaaggttcatccggaagctgccgacacctttgctcacggctgagtacctcccggccttcgccgtggtgcctaacatccccaacctgaagcagcgcctgcaggttcttcacctgctcatcctcatcctcccagaacccaacagaaatgccttaaaggcactgctggaattcctcaggaaggtggtggcccgggaacagcacaacaagatgactctgaggaatgtttccaccgtgatggcccctaacctctttctgcaccaagggcggccccccaagctccccaaaggcaaggagaagcagctggcagaaggggcagccgaggtggtgcagataatggtgcactaccaggatctgctgtggacggtcgcctctttcctggtcgcccaggtgcgaaaactgaacgacagtagcagcaggcgcccccagctctgcgacgcaggcctcaagacttggctgcggaggatgcacgcagacagggacaaggcgggggacggcctcgaggcgactcccaaggtggcaaagatccaggtggtctggcctatcaaggaccccttgaaggtgcctctcacccccagcaccaaagtggcccacgtcctgaggcagttcacagagcacctcagccctggttccaagggtcaagaagacagtgaggacatggacagcctccttctacaccataggtccatggagtcagccaacatcctcctctatgaagttggagggaatatcagtaagttccactgtgggaaacaggaacagagcccgggtccctgggagttcttcgacctcaaaggctcactgggcccttctgtgggaggccagaatgagcatcgcctggacccagatgcctacctcttagatctgtaccgtgccaacccgcatgcacctgcggtggtccctttgcacacctcattcactcattcccagggtctggatgacaggatgcagtgtggttggagggaaaatcctttacccttggcaggaggaagaggaagagacaccagagccccctctctctccccacgagagcagagaggacaggcggcgcgaggacgcagtgaggtggcaactgtctgcgagctaggagaagcctcaccaaaacccacattttctgtgctggaggacagggctgagccctctggccattcattgatgctcccatgtcacactggtcatgcctcttggtggcccgaagtggcctgcccccaacaactgcaggtagccccaggacacagggagcaccagtctggcctagtgtcgcaaaggcctagtgccacaaagaccacagctgccctcagcttttcagacactggacatgagtgttcttggtcttccaatgatgccaaagtcctgccgccctgcaaacagctcctctgcccaccaggacatcttgccttctccggacctgcttctccccggacctcgggggttgtgtggtcagtgctggctggtccctggtga

SEQ ID NO: 10878 - protein, 835 aa, Homo sapiens
MDQLPQKNLLRLHPAGSAGCSTGVESSSMDGFWMEVEQIQQRDELREEDSGGNEGQLPEEGEAESQWLQDTGLSGLLGGLGLDGDHQELLSTLTQTQVAAVCRRLDIYARSVRRQHKTPVRDVRDVFGVFNSGKMSSENGDSGMKGAQLSSGASKFPPAAEPGGLQEQAGREEAFNMDSAYSEQAAVLLQRSRPSRGGTSAWGKCSLPKFTVPKGRLGVTRIGDLSLQDMRKVPSLALIELTALCDILGLDLKRSKAGKWKAAETRLFGVPLDSLLEADHKVLPSTQVPLVLQALLSCLEKRGLDMEGILRVPGSQARVKGLEQKLERDFYAGLFSWDEVHHNDASDLLKRFIRKLPTPLLTAEYLPAFAVVPNIPNLKQRLQVLHLLILILPEPNRNALKALLEFLRKVVAREQHNKMTLRNVSTVMAPNLFLHQGRPPKLPKGKEKQLAEGAAEVVQIMVHYQDLLWTVASFLVAQVRKLNDSSSRRPQLCDAGLKTWLRRMHADRDKAGDGLEATPKVAKIQVVWPIKDPLKVPLTPSTKVAHVLRQFTEHLSPGSKGQEDSEDMDSLLLHHRSMESANILLYEVGGNISKFHCGKQEQSPGPWEFFDLKGSLGPSVGGQNEHRLDPDAYLLDLYRANPHAPAVVPLHTSFTHSQGLDDRMQCGWRENPLPLAGGRGRDTRAPSLSPREQRGQAARGRSEVATVCELGEASPKPTFSVLEDRAEPSGHSLMLPCHTGHASWWPEVACPQQLQVAPGHREHQSGLVSQRPSATKTTAALSFSDTGHECSWSSNDAKVLPPCKQLLCPPGHLAFSGPASPRTSGVVWSVLAGPW

SEQ ID NO: 10879 - DNA, 775 bp, Homo sapiens
ccttcttctgcccccagctcacgtctgaatccctcggcgccccctttctcttctcctagccccttcctcacgtcccctgcctccgggtatttcctctctccaatcccccacccccgcaccgcctgattccgaggggcctccgcagcccagctcgcgccccgcggcagctccgcagtgcactagccaccaccgccgccgccgccgctccgccagacctgctgccagcttgcccggtccagccctgagagagcctcgaacgccagctgcgagggtcatgagccagagagccccggggcgccgcgcggagagcaagcggagatagcgactttgcgccccccagccctcgccttcttgcatcgcgttccccgcatcctcgggtccttctgtcctttccgctgtccccaccgccgccatggccaccttgctccgcagcaagctgtccaacgtggccacgtccgtgtccaacaagtcccaggccaagatgagcggcatgttcgccaggatgggttttcaggcggccacggatgaggaggcggtgggcttcgcgcattgcgacgacctcgactttgagcaccgccagggcctgcagatggacatcctgaaagccgagggagagccctgcggggacgagggcgctgaagcgcccgtcgagggagacatccattatcagcgaggcagcggagctcctctgccgccctccggctccaaggaccaggtgggaggtggtggcgaattcgggggccacgacaagcccaaaatcacggcgtgggaggca

SEQ ID NO: 10880 - protein, 120 aa, Homo sapiens
MATLLRSKLSNVATSVSNKSQAKMSGMFARMGFQAATDEEAVGFAHCDDLDFEHRQGLQMDILKAEGEPCGDEGAEAPVEGDIHYQRGSGAPLPPSGSKDQVGGGGEFGGHDKPKITAWE

SEQ ID NO: 10881 - DNA, 2811 bp, Homo sapiens
cttctgcccccagctcacgtctgaatccctcggcgccccctttctcttctcctagccccttcctcacgtcccctgcctccgggtatttcctctctccaatcccccacccccgcaccgcctgattccgaggggcgggagcgcattgggctgcgcacgggtgggggcgccgcgccagcttcgcgtagctgctctgacgccgctgccgccgccgccgccgccgccgccctccgcagcccagctcgcgccccgcggcagctccgcagtgcactagccaccaccgccgccgccgccgctccgccagacctgctgccagcttgcccggtccagccctgagagagcctcgaacgccagctgcgagggtcatgagccagagagccccggggcgccgcgcggagagcaagcggagatagcgactttgcgccccccagccctcgccttcttgcatcgcgttccccgcatcctcgggtccttctgtcctttccgctgtccccaccgccgccatggccaccttgctccgcagcaagctgtccaacgtggccacgtccgtgtccaacaagtcccaggccaagatgagcggcatgttcgccaggatgggttttcaggcggccacggatgaggaggcggtgggcttcgcgcattgcgacgacctcgactttgagcaccgccagggcctgcagatggacatcctgaaagccgagggagagccctgcggggacgagggcgctgaagcgcccgtcgagggagacatccattatcagcgaggcagcggagctcctctgccgccctccggctccaaggaccaggtgggaggtggtggcgaattcgggggccacgacaagcccaaaatcacggcgtgggaggcaggctggaacgtgaccaacgccatccagggcatgttcgtgctgggcctaccctacgccatcctgcacggcggctacctggggttgtttctcatcatcttcgccgccgttgtgtgctgctacaccggcaagatcctcatcgcgtgcctgtacgaggagaatgaagacggcgaggtggtgcgcgtgcgggactcgtacgtggccatagccaacgcctgctgcgccccgcgcttcccaacgctgggcggccgagtggtgaacgtagcgcagatcatcgagctggtgatgacgtgcatcctgtacgtggtggtgagtggcaacctcatgtacaacagcttcccggggctgcccgtgtcgcagaagtcctggtccattatcgccacggccgtgctgctgccttgcgccttccttaagaacctcaaggccgtgtccaagttcagtctgctgtgcactctggcccacttcgtcatcaatatcctggtcatagcctactgtctatcgcgggcgcgcgactgggcctgggagaaggtcaagttctacatcgacgtcaagaagttccccatctccattggcatcatcgtgttcagctacacgtctcagatcttcctgccttcgctggagggcaatatgcagcagcccagcgagttccactgcatgatgaactggacgcacatcgcagcctgcgtgctcaagggcctcttcgcgctcgtcgcctacctcacctgggccgacgagaccaaggaggtcatcacggataacctgcccggctccatccgcgccgtggtcaacatctttctggtggccaaggcgctgttgtcctatcctctgccattctttgccgctgtcgaggtgctggagaagtcgctcttccaggaaggcagccgcgcctttttcccggcctgctacagcggcgacgggcgcctgaagtcctgggggctgacgctgcgctgcgcgctcgtcgtcttcacgctgctcatggccatttatgtgccgcacttcgcgctgctcatgggcctcaccggcagcctcacgggcgccggcctctgtttcttgctgcccagcctctttcacctgcgcctgctctggcgcaagctgctgtggcaccaagtcttcttcgacgtcgccatcttcgtcatcggcggcatctgcagcgtgtccggcttcgtgcactccctcgagggcctcatcgaagcctaccgaaccaacgcggaggactagggcgcaagggcgagcccccgccgcgcttctgcgctctctcccttctcccctcaccccgcccccaccagcccagtgcgccctgccgccgcgcttgggaggccaagctttaaacatctctggttcctagtttctgattattcggggatgggggggatgggaggggacagggattcacgatccatcgcgtctgcgtttctgttgtcctttcttttccacaacaccctggttttggggggaggcggggtgcatttgcgggcagggttctctgtccttccaagtggggccccgacactttggttccagtcatcgagggggttgggaagggagggagagggggcgcagctcgcaggcgtggcaacttgaccttgggggaatatttcacatccatccagagctcggaatctacagcgtccagccatttccagcaagagcgcttcccattccggagacgtttcaaccctgcagcgggaaaggctgactgggaaatccattttgggtgggcaatttccttcaacgaagccggaaggcgagaagccgcggcggggccagcttgcctgccggttttcaggaatctaaactctcatcttgtgcaatttatcaggtgtggaactgttctactgtgcgtgtggtgtgctcgtggtgaataagatgaaatgtatatcagaaaaaaatctatctctaatttagagtgcggtacataattatatccgcaaataaagaagagacaaaggct

SEQ ID NO: 10882 - protein, 525 aa, Homo sapiens; identical to SEQ ID NO: 1678

SEQ ID NO: 10883 - DNA, 2414 bp, Homo sapiens
agaatttcgcagccagaatgggtacgtctcagcgatcctgaaagcagccttgacagccagaggcgagtcaagtggaaaggctggccgggcttcgagaagggagggggcatcgaggtacttaaaggcctgaatcgcgcggcgtgacgtcgggggcgcggtttcgcggcgtctgggcggacactgcgccgaggggcggggctggacgcgcgctccaagatggcggcgaacgtgttcccgttccgcgacgcccgtgccgcaccggacccagtgctggaggccggcccggtggcacacgggccactgccggtaccgctggtgctggacaacgggtcgttccaagtccgcgctggctgggcgtgtcccgggcaggacccaggtcccgagccgcgcctgcagttccgcgcggtgtgcgcccgcggtcgtggcggggcacggggcgcgtcgggcccgcaggtggggaacgctctgggcagcctggagccactgcgctggatgctgcgctcgcccttcgaccgcaacgtgccggtcaacctggagcttcaggagttgctgctggactacagcttccagcacctgggtgtctcctcacagggctgtgttgatcatcccatagttttgacagaagctgtgtgcaacccactgtattcacggcaaatgatgtctgagcttctttttgagtgctacgggattcccaaggttgcctatggaatagacagcctcttcagcttctaccacaataagccaaagaactcgatgtgcagtgggctaatcatttcatctggataccagtgtacgcatgttttacccatcttagaagggagattagatgctaaaaactgcaagcgcatcaatcttggaggaagccaagcagctggttacctccagcgtctcctccagctgaagtaccctgggcacctggcagccatcaccctcagccgcatggaggagattctgcatgagcacagctacatcgctgaggattatgtggaagaattacacaaatggcggtgtcctgattattatgagaataatgtccacaagatgcagctcccattttccagcaagctcctgggcagcactctgacctctgaggagaaacaagaaaggcggcagcagcaattgcggcggctgcaggagctcaatgcccggcggcgggaggagaagctgcagctggatcaggagcgtctggaccgactgctatatgtgcaggaacttctagaggatggccagatggatcagtttcacaaagctctgatagagctgaatatggactccccagaagagctgcagtcctacatccagaagctcagtatagcagtggagcaggctaagcagaaaatcctccaagcggaagtcaacctcgaggtggatgtggtagacagcaagccagagacccctgacctggagcagctggagccgtctttggaagatgtggaaagcatgaatgattttgatcccttgttttcagaggaaacacctggagtggagaagccggtcaccactgttcagcccgtgtttaacttggcagcatatcatcagctatttgttgggacagaaagaattcgagctccagagattattttccagccatctctcataggagaagaacaggctgggattgcagagactcttcagtacattctggacaggtacccaaaggacattcaggaaatgctggttcagaacgttttcctcactggcggcaacacgatgtatcctggcatgaaagccagaatggagaaggaactgttggagatgagacccttccggtcttcttttcaggttcaacttgcctcgaaccctgtgctggatgcctggtacggtgctcgtgactgggccttgaaccacctagatgataatgaagtttggatcaccaggaaagagtatgaagaaaagggaggagagtacctcaaggagcactgtgcttccaacatctatgtccccatccgcctgccgaagcaggcctcccgctcctcagatgcccaggcatccagcaagggctccgctgctggtggaggtggtgctggtgagcaggcatagcagaggccctccagagagactgccctgcacgccatgccttgggccacgttggcagtgtgacaggactgtgattgtgctagatgtacctgcccaagtctgctggtcacatttggcagcaaaatggatttctcctggggagaacaaagttaagggacactgagacctgcccttcagaattcggttcacttgggggcttctgtggtagagactaactggccttctgatgtctttgttcaactgtggccagctgtggcatcagcttcctggagcagtaaatgaagacagagtggaggacacaaatgtacaaaatgcacaagactgatttcttaccacattttagtctttcttgttttaaaaaaaattctttaaaattt

SEQ ID NO: 10884 - protein, 607 aa, Homo sapiens; identical to SEQ ID NO: 1680

SEQ ID NO: 10885 - DNA, 2744 bp, Homo sapiens
agaatttcgcagccagaatgggtacgtctcagcgatcctgaaagcagccttgacagccagaggcgagtcaagtggaaaggctggccgggcttcgagaagggagggggcatcgaggtacttaaaggcctgaatcgcgcggcgtgacgtcgggggcgcggtttcgcggcgtctgggcggacactgcgccgaggggcggggctggacgcgcgctccaagatggcggcgaacgtgttcccgttccgcgacgcccgtgccgcaccggacccagtgctggaggccggcccggtggcacacgggccactgccggtaccgctggtgctggacaacgggtcgttccaagtccgcgctggctgggcgtgtcccgggcaggacccaggtcccgagccgcgcctgcagttccgcgcggtgtgcgcccgcggtcgtggcggggcacggggcgcgtcgggcccgcaggtggggaacgctctgggcagcctggagccactgcgctggatgctgcgctcgcccttcgaccgcaacgtgccggtcaacctggagcttcaggagttgctgctggactacagcttccagcacctgggtgtctcctcacagggctgtgttgatcatcccatagttttgacagaagctgtgtgcaacccactgtattcacggcaaatgatgtctgagcttctttttgagtgctacgggattcccaaggttgcctatggaatagacagcctcttcagcttctaccacaataagccaaagaactcgatgtgcagtgggctaatcatttcatctggataccagtgtacgcatgttttacccatcttagaagggagattagatgctaaaaactgcaagcgcatcaatcttggaggaagccaagcagctggttacctccagcgtctcctccagctgaagtaccctgggcacctggcagccatcaccctcagccgcatggaggagattctgcatgagcacagctacatcgctgaggattatgtggaagaattacacaaatggcggtgtcctgattattatgagaataatgtccacaagatgcagctcccattttccagcaagctcctgggcagcactctgacctctgaggagaaacaagaaaggcggcagcagcaattgcggcggctgcaggagctcaatgcccggcggcgggaggagaagctgcagctggatcaggagcgtctggaccgactgctatatgtgcaggaacttctagaggatggccagatggatcagtttcacaaagctctgatagagctgaatatggactccccagaagagctgcagtcctacatccagaagctcagtatagcagtggagcaggctaagcagaaaatcctccaagcggaagtcaacctcgaggtggatgtggtagacagcaagccagagacccctgacctggagcagctggagccgtctttggaagatgtggaaagcatgaatgattttgatcccttgttttcagaggaaacacctggagtggagaagccggtcaccactgttcagcccgtgtttaacttggcagcatatcatcagctatttgttgggacagaaagaattcgagctccagagattattttccagccatctctcataggagaagaacaggctgggattgcagagactcttcagtacattctggacaggtacccaaaggacattcaggaaatgctggttcagaacgttttcctcactggcggcaacacgatgtatcctggcatgaaagccagaatggagaaggaactgttggagatgagacccttccggtcttcttttcaggttcaacttgcctcgaaccctgtgctggatgcctggtacggtgctcgtgactgggccttgaaccacctagatgataatgaagtttggatcaccaggaaagagtatgaagaaaagggaggagagtacctcaaggagcactgtgcttccaacatctatgtccccatccgcctgccgaagcaggcctcccgctcctcagatgcccaggcatccagcaagggctccgctgctggtggaggtggtgctggtgagcaggcatagcagaggccctccagagagactgccctgcacgccatgccttgggccacgttggcagtgtgacaggactgtgattgtgctagatgtacctgcccaagtctgctggtcacatttggcagcaaaatggatttctcctggggagaacaaagttaagggacactgagacctgcccttcagaattcggttcacttgggggcttctgtggtagagactaactggccttctgatgtctttgttcaactgtggccagctgtggcatcagcttcctggagcagtaaatgaagacagagtggaggacacaaatgtacaaaatgcacaagactgatttcttaccacattttagtctttcttgttttaaaaaaaattctttaaaatttatcttgtccgtgtagatactttattcttctggatgtattcagaaattgcatgaatgcccagtgaggggaggtctttcatgcatataaaaaggtaatgtttattgccgggcacagtggcacgtgcctgttaaggcccagctttgtgggaggctaaggcaggaggatcgctggagcttaggagttcgaggctatcgtgtgctgtgatcgcacctgtgaataaccactgcactccagcctgggcaacataggaagacattgtctctaaaaagatacatttttcataaaaggtaatgtttattcaataaaagcagttgcctcaggaaccggaaa

SEQ ID NO: 10886 - protein, 607 aa, Homo sapiens; identical to SEQ ID NO: 1680

SEQ ID NO: 10887 - DNA, 6251 bp, Homo sapiens; identical to SEQ ID NO: 1681

SEQ ID NO: 10888 - protein, 567 aa, Homo sapiens; identical to SEQ ID NO: 1682

SEQ ID NO: 10889 - DNA, 720 bp, Homo sapiens
agcagctgcggctcggggacccacagacacagccggggtcgggagccgcccggggcagggctcgggagagcggatacttcctggatgacctcacccgacctggcctccacagatccctgccacagatatcttgccagttctggacactctgttgacttgtgggcccatgtatcccattctctgcaggatgttccgtctggattttccgatgctgggcttgctatgtctccatggagctggttttcctccaaatgaggtcttccttggggatcccctttaagtcttgatgataaccattgctctcccaggtcctggcagtttgtgctgtgttcccatcaccctctggggctttctctggaagtgtggataggtgagcccaggtcttacaaggaggacagtctgcagcctattggagccatggctgccgtgggctgccccagcacccaggccagtgccctgtcttggggccaccccgctgctgtgtttgcagcaccatggcagttctttaattagaccaagcagggatttctcagacgggggtgggaggaggtgtgcgggtctattgggggaaactaggtcacctgaaaaccagtaatcaagagggagctgtcctcgagccccagctccaaggaacccagaggggcaaggtgggaggggctcgcggggagggccaagtcagagaaaatatgcctctggccccttttactggcccttgggaga

SEQ ID NO: 10890 - protein, 56 aa, Homo sapiens
MTSPDLASTDPCHRYLASSGHSVDLWAHVSHSLQDVPSGFSDAGLAMSPWSWFSSK

SEQ ID NO: 10891 - DNA, 505 bp, Homo sapiens
gcggccgccgcaagaaagtgtccttcgaggccagcgtggccctgctggaggcctcgctgaggaacgacgccgaggaagaggaggagcaggagccacgcctatggtcgcatgttgctaaccatctcgaggtcaggaagatgctctgtgagacggagtgggtcagatgccaaagaaaacacaagcttgtcagcggtgatgtctccctgcaaaggcagccgccaccagcttcctgccgagatgggccggctcagcctcacttgctacagctggagatggagaggaccagatggccctgtttggcccagattccagccagattgccagggaggtgtaggcggagcagcggggtcggcgccaggagcagggatacgtgagtgaggagggcgggagccacctctttgccatctcagtagggccctgcctgtgtagggggtggcggggcaccgactgtggccttacagtggtctgtgaaccagcatatgctcagagctccctggagggagac

SEQ ID NO: 10892 - protein, 89 aa, Homo sapiens
MLLTISRSGRCSVRRSGSDAKENTSLSAVMSPCKGSRHQLPAEMGRLSLTCYSWRWRGPDGPVWPRFQPDCQGGVGGAAGSAPGAGIRE

SEQ ID NO: 10893 - DNA, 7436 bp, Homo sapiens
gcggatggacagcaggccccgcgccgggtgctgcgagtggctgagatgctgcggtggaggggaggccaggccccgcactgtctggctggggcaccccgagaagagagaccagaggtatcctcggaatgtcatcaacaatcagaagtacaatttcttcacctttcttcctggggtgctgttcaaccagttcaaatactttttcaacctctatttcttacttcttgcctgctctcagtttgttcccgaaatgagacttggtgcactctatacctactgggttcccctgggcttcgtgctggccgtcactgtcatccgtgaggcggtggaggagatccgatgctacgtgcgggacaaggaagtcaactcccaggtctacagccggctcacagcacgaggtactgttgtgggtgttgttctttacactggcagagaactccggagtgtcatgaatacctcaaatccccgaagtaagatcggcctgttcgacttggaagtgaactgcctcaccaagatcctctttggtgccctggtggtggtctcgctggtcatggttgcccttcagcactttgcaggccgttggtacctgcagatcatccgcttcctcctcttgttttccaacatcatccccattagtttgcgtgtgaacctggacatgggcaagatcgtgtacagctgggtgattcgaagggactcgaaaatccccgggaccgtggttcgctccagcacgattcctgagcagctgggcaggatttcgtacttactcacagacaagacaggcactcttacccagaacgagatgattttcaaacggctccatctcggaacagtagcctacggcctcgactcaatggacgaagtacaaagccacattttcagcatttacacccagcaatcccaggacccaccggctcagaagggcccaacgctcaccactaaggtccggcggaccatgagcagccgcgtgcacgaagccgtgaaggccatcgcgctctgccacaacgtgactcccgtgtatgagtccaacggtgtgactgatcaggctgaggccgagaagcagtacgaagactcctgccgcgtataccaggcatccagccccgatgaggtggccctggtacagtggacggaaagtgtgggcttaaccctggtgggccgagaccagtcttccatgcagctgaggacccctggcgaccagatcctgaacttcaccatcctacagatcttccctttcacctatgaaagcaaacgtatgggcatcatcgtgcgggatgaatcaactggagaaattacgttttacatgaagggagcagatgtggtcatggctggcattgtgcagtacaatgactggttggaggaagagtgtggcaacatggcccgagaagggctgcgggtgctcgtggtggcaaagaagtctcttgcagaggagcagtatcaggactttgaagcccgctacgtccaggccaagctgagtgtgcacgaccgctccctcaaagtggccacggtgatcgagagcctggagatggagatggaactgctgtgcctgacgggcgtggaggaccagctgcaggcagatgtgcggcccacgctggagaccctgaggaatgctggcatcaaggtttggatgctgacaggggacaagctggagacagctacgtgcacagcgaagaatgcacatctggtgaccagaaaccaagacatccacgtttttcggctggtgaccaaccgcggggaggctcacctcgagctgaacgccttccgcaggaagcatgattgtgccctggtcatctcgggagactccctggaggtttgcctcaagtactatgagtacgagttcatggagctggcctgccagtgcccggccgtagtctgctgccgatgtgcccccacccagaaggcccagatcgtgcgcctgcttcaggagcgcacgggcaagctcacctgtgcagtaggggacggaggcaatgacgtcagcatgattcaggaatctgactgcggcgtgggagtggaaggaaaggaaggaaaacaggcttcgttggctgcagacttctccatcactcaatttaagcatcttggccggttgcttatggtgcatggccggaacagctacaagcggtcagccgccctcagccagttcgtgattcacaggagcctctgtatcagcaccatgcaggctgtcttttcctccgtgttttactttgcctccgtccctctctatcaaggattcctcatcattgggtactccacaatttacaccatgtttcctgtgttttctctggtcctggacaaagatgtcaaatcggaagttgccatgctgtatcctgagctctacaaggatcttctcaagggacggccgttgtcctacaagacattcttaatatgggttttgattagcatctatcaagggagcaccatcatgtacggggcgctgctgctgtttgagtcggagttcgtgcacatcgtggccatctccttcacctcgctgatcctcaccgagctgctcatggtggcgctgaccatccagacctggcactggctcatgacagtggcggagctgctcagcctggcctgctacatcgcctccctggtgttcttacacgagttcatcgatgtgtacttcatcgccaccttgtcattcttgtggaaagtctccgtcatcactctggtcagctgcctccccctctatgtcctcaagtacctgcgaagacggttctctccccccagctactcaaagctcacatcataggccgtgcgttcgctggagggggccctggtcttggcgcttccctgatggacagagctcaagttccatttatattaaccgccacctgtggattttgcagtaattgctaacacatgcagttttaatgggaagtggctctgcgcctaaacggagtcctaacgctgcatcaacgggagggagggtcctgaaagagacccatctgggcctgtctgaacccctcgttcttcatgtttaggtgaatatgaatatgttaaagctggtggctcagctgggagatttatatgggtcactgtgcgagcttccttatgacttgaattttgttgtcacatgataaaagtttctgtgtagctgaaggttgtagaaggcttgtgtgtgtgtgtgtgtgtgtgtgtgtgtgtgtgtgtgtttttaaagagtcctaatgtgtatgtactctttatgtctttcttgctcttacaaagaggtgtcagaaaaatagaaagctcttggtgtcggtttgggaggaaaagacagtgacatttggtaaaaagttatccacacaataatctccattcggaaatgctcagtatcgtctccagccagccctgcttatccaggttacactggattcctgggatcgtaaccagtaaatgagaggagagggagagagagtgtcctaagtccaatctgttatccttgatctgattcagcatccatagtgtgtgagttaacttcacctgccacctcgtaaaagaatttcagaggtgtgatcccgctttattgggacctggtaacaatcacaaagccagtggctgtttgagaaggacctcagacattttcagcagagttgttttagcaggaaacgtgccactgaatggcccctaaatgtgtcgacagtgtgataagagactcaactaattctttaggcaacatggcagatgtgactcagatcctccaagaccaaagcggaaaggtcagggggctgggactcttctcttccatagaagcctgtttcctgttaggaggcataatggaagatgaccccacaaaggcagaggcatctttcggaacaacactggtggcagctttcagaacaaggaacccctggtgggaggacgcccaagctacagcgttgggatctgggatctgttccactgccggcagatttcaaggggaacttgctgaaaggcagccagtggtgaagatttctcccctcccaggatggactacatgccggcatgtttcttataaagctgtggctgcttgtttcagaggaagggagtttgcagtcgcgggacgtggtagagcaaggcattcttgggttttcaagttgcttcttgcagaagccacatatgcatgccataagggttaagttggtggatctttaagagccaagtgtggttgagatcttggatttgcgtttacttcttgatgaatacatatccttcaaaccctctgcctggcgctacttctgtgtgcttcagagatgtacatcacagcctggtttctgatgcctactaactcctgctcttggagagctggagacacgaggatcagatagtcccttgcctttggagcactcttgataagcttttgtattttgtgttgtccttttaaaatgttctagaatgactttacgttgcaggtactggttaattggctgttgacaccacatctattttgtcttatgattctgcagttttgcagtacttttctctatctgattcagccatttctgccagagggaaaaggtcggcagaaaagatgtattgagtgaatagttaaggataggatctttgtccaaaaatttcagaaagattgagcaaatctgacgtattcattgagtgagtttctgtgttttcaaaggtggaggagaaatttgtgctggaagtttttaagcctccgttttcttggaaatcagtctgtaacactggcaagtcttaagatagtcccatttagactttgcagatgctgaacctggctctgtaacgctgggaagtcttaagatagtcctgtttagactttgcaaaccctgtacctggctttgctcggagattcgggatgctggctcctgcaggcagggcgtgtgggagcctcgtcagaaagttttagaggtttccagcagaagcagaatgaagatggtctccctggccttttccttaattctcaattttgattgaggtgcacaagttgacttttaaagccaacgcttaagatactgattgacatcttcaagggagaatgctcccaggaggggctgaagaagccatagttggaagtggaaggtactcgtcagtgttctccacaaacctttttactctgttgtctcagccgcactggggcggaggcggtcaagggtgagaagtaccgacactcaagtgcaaactgccacgtcgttggcccatcccatcagtgggcagctggctgacgccattcactggacggtccctgaacacctaggaatgcacacaccgtgcttctcagacactggagacgcaaaggcaggaggatgcagtccggtgagaggacacgatctttacctgcacaatcagactgtaagcccagcagagaaccccaggggcgcctgggtacttctcggaggtcatcttagttgtggtggggaagacaaagaaataagcaaacaagaaactagagttactatacaagaaactctcctgagtttgtaaaccttaagcataaggattcagttgacctttttcttggttcatcaatctggaaagaacttacataaagcgccattgacactgtcacctgggagctccatgggccgtaagtctttgacagccaatttaatttgaggtcagagggccttgaggtacacagtcagcactgtttgaacacttttcctgaaagcaaaactcacagctccctgcgccctctgacaacactagctatttctgccagagtaagaacttctattactattttattattgttcatatgtcttttgatgatggttgtgtgacagggggaagcaggatctatttggtttcttcccctccccccaccccttcctttttgtctctctttttttttctctaagaaaatcaccagactagtttttccatcttgagtaatttcttatgtgggacagttttgatcctcattttgaaagcatgcgtgtgcacatgtgtgttgcctgtggtgccaggtgagacaggtggcactaactccagctgcttggaaggcatcccaagggcgcatcttaaagttggagcagacctcccttttccagcccctggggccattagaccacgtgctggaactagcattgtaaaattcccatcccagttccactcccctgaagtgaaacccttttttttttgtgacagtaaatcttaaaaatcattgtctctttatgaacatttcctcagtttcttctctgctgaaaatgtaagccatgctactttttaatgtattttgaattttgtgctcattggaaattgatatgctaatgcctcccccaccccccgccagacttttctttttatactttgtcttgtttttactggggtaggctgggcatgcgtgcgtgcctttagggcagcattttaaacctttgccaaaattgcaaatgggacatgtacattcttctgctccatcctacttaaacacctatcagctatttttatctttaaccttttctgtatgtttgaagtgtgtggggggtgtgtgtgtgtgtgaaagagcgagagaatgatgtcatctaaagttttttgaagaattatttggttttcattgcattaaaattctatcactcccagctttgttttcatttaaaaaaatatacaaagagctttgtaaatacaacacattttatttctcccccttcttttaatgtacagcttttttgccacttatatatacttaaaatattcccatgaattatgtccagttcttcttggaaaaaaatttggttttgaatgaacctgcaaagcatcctgcagcgtgagcagctcctccacctggagctccgaagcatcttctcaggccaaagcggcattacccgtgaatctgtcttctccgccacagcatggtttgaggcgcagtctgttaatatagctgggccatgtcagtgactgttgtgtttgtggggtcaggtggggggcatggtatttgcaaaaaaaacaaattatggctaatttattattttgttgcagtggggttaactgtaaactcatgtaagagtctgtgatttcctcattggttgatctctctctctgtaatcctcattgcaaattttcaccaggacagcgttttttgattagaggggagctctggcacagtatgctttaatttagcaggaacttccagatgatttaaattctcgatgctgtgatgacacacatatgatctttcgtgtttctgagcgactctactttcattgtttgccagcgtggctcgttgctgttgcccaataaagcttgtgtacgttctgccttgggggattattttaatttgtacagaaacatgaattctggtatcaaaatgaggactttttattataacgctcctattttttctttatttcatggtacatgaaatgtaaagaaaactctttccagttcagaaaattattttgattttggcaaaaaaaaccccaaatcaatgcatgttatttattattttgtactattgtccatcccagacgtgtcagaatttcaaaaggtgatagatataaatggaaaataagatgaaa

SEQ ID NO: 10894 - protein, 911 aa, Homo sapiens
MDSRPRAGCCEWLRCCGGGEARPRTVWLGHPEKRDQRYPRNVINNQKYNFFTFLPGVLFNQFKYFFNLYFLLLACSQFVPEMRLGALYTYWVPLGFVLAVTVIREAVEEIRCYVRDKEVNSQVYSRLTARGTVVGVVLYTGRELRSVMNTSNPRSKIGLFDLEVNCLTKILFGALVVVSLVMVALQHFAGRWYLQIIRFLLLFSNIIPISLRVNLDMGKIVYSWVIRRDSKIPGTVVRSSTIPEQLGRISYLLTDKTGTLTQNEMIFKRLHLGTVAYGLDSMDEVQSHIFSIYTQQSQDPPAQKGPTLTTKVRRTMSSRVHEAVKAIALCHNVTPVYESNGVTDQAEAEKQYEDSCRVYQASSPDEVALVQWTESVGLTLVGRDQSSMQLRTPGDQILNFTILQIFPFTYESKRMGIIVRDESTGEITFYMKGADVVMAGIVQYNDWLEEECGNMAREGLRVLVVAKKSLAEEQYQDFEARYVQAKLSVHDRSLKVATVIESLEMEMELLCLTGVEDQLQADVRPTLETLRNAGIKVWMLTGDKLETATCTAKNAHLVTRNQDIHVFRLVTNRGEAHLELNAFRRKHDCALVISGDSLEVCLKYYEYEFMELACQCPAVVCCRCAPTQKAQIVRLLQERTGKLTCAVGDGGNDVSMIQESDCGVGVEGKEGKQASLAADFSITQFKHLGRLLMVHGRNSYKRSAALSQFVIHRSLCISTMQAVFSSVFYFASVPLYQGFLIIGYSTIYTMFPVFSLVLDKDVKSEVAMLYPELYKDLLKGRPLSYKTFLIWVLISIYQGSTIMYGALLLFESEFVHIVAISFTSLILTELLMVALTIQTWHWLMTVAELLSLACYIASLVFLHEFIDVYFIATLSFLWKVSVITLVSCLPLYVLKYLRRRFSPPSYSKLTS

SEQ ID NO: 10895 - DNA, 7840 bp, Homo sapiens
atgacggacaacatcccgctgcagccggtgcgccagaagaagcggatggacagcaggccccgcgccgggtgctgcgagtggctgagatgctgcggtggaggggaggccaggccccgcactgtctggctggggcaccccgagaagagagaccagaggtatcctcggaatgtcatcaacaatcagaagtacaatttcttcacctttcttcctggggtgctgttcaaccagttcaaatactttttcaacctctatttcttacttcttgcctgctctcagtttgttcccgaaatgagacttggtgcactctatacctactgggttcccctgggcttcgtgctggccgtcactgtcatccgtgaggcggtggaggagatccgatgctacgtgcgggacaaggaagtcaactcccaggtctacagccggctcacagcacgaggcacagtgaaggtgaagagttctaacatccaagttggagaccttatcatcgttgaaaagaaccagcgggtccctgccgacatgatcttcctgaggacatcagaaaaaaacgggtcatgcttcttgcggacggatcagctggatggggagacggactggaagctgcggcttcccgtggcctgcacgcagaggctccccacggccgccgaccttcttcagattcgatcgtatgtgtacgcagaagagccaaatattgacattcacaacttcgtgggaacttttacccgagaagacagcgaccccccgatcagcgagagcctgagcatagagaacacgctgtgggctggcactgtggtcgcatcaggtactgttgtgggtgttgttctttacactggcagagaactccggagtgtcatgaatacctcaaatccccgaagtaagatcggcctgttcgacttggaagtgaactgcctcaccaagatcctctttggtgccctggtggtggtctcgctggtcatggttgcccttcagcactttgcaggccgttggtacctgcagatcatccgcttcctcctcttgttttccaacatcatccccattagtttgcgtgtgaacctggacatgggcaagatcgtgtacagctgggtgattcgaagggactcgaaaatccccgggaccgtggttcgctccagcacgattcctgagcagctgggcaggatttcgtacttactcacagacaagacaggcactcttacccagaacgagatgattttcaaacggctccatctcggaacagtagcctacggcctcgactcaatggacgaagtacaaagccacattttcagcatttacacccagcaatcccaggacccaccggctcagaagggcccaacgctcaccactaaggtccggcggaccatgagcagccgcgtgcacgaagccgtgaaggccatcgcgctctgccacaacgtgactcccgtgtatgagtccaacggtgtgactgatcaggctgaggccgagaagcagtacgaagactcctgccgcgtataccaggcatccagccccgatgaggtggccctggtacagtggacggaaagtgtgggcttaaccctggtgggccgagaccagtcttccatgcagctgaggacccctggcgaccagatcctgaacttcaccatcctacagatcttccctttcacctatgaaagcaaacgtatgggcatcatcgtgcgggatgaatcaactggagaaattacgttttacatgaagggagcagatgtggtcatggctggcattgtgcagtacaatgactggttggaggaagagtgtggcaacatggcccgagaagggctgcgggtgctcgtggtggcaaagaagtctcttgcagaggagcagtatcaggactttgaagcccgctacgtccaggccaagctgagtgtgcacgaccgctccctcaaagtggccacggtgatcgagagcctggagatggagatggaactgctgtgcctgacgggcgtggaggaccagctgcaggcagatgtgcggcccacgctggagaccctgaggaatgctggcatcaaggtttggatgctgacaggggacaagctggagacagctacgtgcacagcgaagaatgcacatctggtgaccagaaaccaagacatccacgtttttcggctggtgaccaaccgcggggaggctcacctcgagctgaacgccttccgcaggaagcatgattgtgccctggtcatctcgggagactccctggaggtttgcctcaagtactatgagtacgagttcatggagctggcctgccagtgcccggccgtagtctgctgccgatgtgcccccacccagaaggcccagatcgtgcgcctgcttcaggagcgcacgggcaagctcacctgtgcagtaggggacggaggcaatgacgtcagcatgattcaggaatctgactgcggcgtgggagtggaaggaaaggaaggaaaacaggcttcgttggctgcagacttctccatcactcaatttaagcatcttggccggttgcttatggtgcatggccggaacagctacaagcggtcagccgccctcagccagttcgtgattcacaggagcctctgtatcagcaccatgcaggctgtcttttcctccgtgttttactttgcctccgtccctctctatcaaggattcctcatcattgggtactccacaatttacaccatgtttcctgtgttttctctggtcctggacaaagatgtcaaatcggaagttgccatgctgtatcctgagctctacaaggatcttctcaagggacggccgttgtcctacaagacattcttaatatgggttttgattagcatctatcaagggagcaccatcatgtacggggcgctgctgctgtttgagtcggagttcgtgcacatcgtggccatctccttcacctcgctgatcctcaccgagctgctcatggtggcgctgaccatccagacctggcactggctcatgacagtggcggagctgctcagcctggcctgctacatcgcctccctggtgttcttacacgagttcatcgatgtgtacttcatcgccaccttgtcattcttgtggaaagtctccgtcatcactctggtcagctgcctccccctctatgtcctcaagtacctgcgaagacggttctctccccccagctactcaaagctcacatcataggccgtgcgttcgctggagggggccctggtcttggcgcttccctgatggacagagctcaagttccatttatattaaccgccacctgtggattttgcagtaattgctaacacatgcagttttaatgggaagtggctctgcgcctaaacggagtcctaacgctgcatcaacgggagggagggtcctgaaagagacccatctgggcctgtctgaacccctcgttcttcatgtttaggtgaatatgaatatgttaaagctggtggctcagctgggagatttatatgggtcactgtgcgagcttccttatgacttgaattttgttgtcacatgataaaagtttctgtgtagctgaaggttgtagaaggcttgtgtgtgtgtgtgtgtgtgtgtgtgtgtgtgtgtgtgtttttaaagagtcctaatgtgtatgtactctttatgtctttcttgctcttacaaagaggtgtcagaaaaatagaaagctcttggtgtcggtttgggaggaaaagacagtgacatttggtaaaaagttatccacacaataatctccattcggaaatgctcagtatcgtctccagccagccctgcttatccaggttacactggattcctgggatcgtaaccagtaaatgagaggagagggagagagagtgtcctaagtccaatctgttatccttgatctgattcagcatccatagtgtgtgagttaacttcacctgccacctcgtaaaagaatttcagaggtgtgatcccgctttattgggacctggtaacaatcacaaagccagtggctgtttgagaaggacctcagacattttcagcagagttgttttagcaggaaacgtgccactgaatggcccctaaatgtgtcgacagtgtgataagagactcaactaattctttaggcaacatggcagatgtgactcagatcctccaagaccaaagcggaaaggtcagggggctgggactcttctcttccatagaagcctgtttcctgttaggaggcataatggaagatgaccccacaaaggcagaggcatctttcggaacaacactggtggcagctttcagaacaaggaacccctggtgggaggacgcccaagctacagcgttgggatctgggatctgttccactgccggcagatttcaaggggaacttgctgaaaggcagccagtggtgaagatttctcccctcccaggatggactacatgccggcatgtttcttataaagctgtggctgcttgtttcagaggaagggagtttgcagtcgcgggacgtggtagagcaaggcattcttgggttttcaagttgcttcttgcagaagccacatatgcatgccataagggttaagttggtggatctttaagagccaagtgtggttgagatcttggatttgcgtttacttcttgatgaatacatatccttcaaaccctctgcctggcgctacttctgtgtgcttcagagatgtacatcacagcctggtttctgatgcctactaactcctgctcttggagagctggagacacgaggatcagatagtcccttgcctttggagcactcttgataagcttttgtattttgtgttgtccttttaaaatgttctagaatgactttacgttgcaggtactggttaattggctgttgacaccacatctattttgtcttatgattctgcagttttgcagtacttttctctatctgattcagccatttctgccagagggaaaaggtcggcagaaaagatgtattgagtgaatagttaaggataggatctttgtccaaaaatttcagaaagattgagcaaatctgacgtattcattgagtgagtttctgtgttttcaaaggtggaggagaaatttgtgctggaagtttttaagcctccgttttcttggaaatcagtctgtaacactggcaagtcttaagatagtcccatttagactttgcagatgctgaacctggctctgtaacgctgggaagtcttaagatagtcctgtttagactttgcaaaccctgtacctggctttgctcggagattcgggatgctggctcctgcaggcagggcgtgtgggagcctcgtcagaaagttttagaggtttccagcagaagcagaatgaagatggtctccctggccttttccttaattctcaattttgattgaggtgcacaagttgacttttaaagccaacgcttaagatactgattgacatcttcaagggagaatgctcccaggaggggctgaagaagccatagttggaagtggaaggtactcgtcagtgttctccacaaacctttttactctgttgtctcagccgcactggggcggaggcggtcaagggtgagaagtaccgacactcaagtgcaaactgccacgtcgttggcccatcccatcagtgggcagctggctgacgccattcactggacggtccctgaacacctaggaatgcacacaccgtgcttctcagacactggagacgcaaaggcaggaggatgcagtccggtgagaggacacgatctttacctgcacaatcagactgtaagcccagcagagaaccccaggggcgcctgggtacttctcggaggtcatcttagttgtggtggggaagacaaagaaataagcaaacaagaaactagagttactatacaagaaactctcctgagtttgtaaaccttaagcataaggattcagttgacctttttcttggttcatcaatctggaaagaacttacataaagcgccattgacactgtcacctgggagctccatgggccgtaagtctttgacagccaatttaatttgaggtcagagggccttgaggtacacagtcagcactgtttgaacacttttcctgaaagcaaaactcacagctccctgcgccctctgacaacactagctatttctgccagagtaagaacttctattactattttattattgttcatatgtcttttgatgatggttgtgtgacagggggaagcaggatctatttggtttcttcccctccccccaccccttcctttttgtctctctttttttttctctaagaaaatcaccagactagtttttccatcttgagtaatttcttatgtgggacagttttgatcctcattttgaaagcatgcgtgtgcacatgtgtgttgcctgtggtgccaggtgagacaggtggcactaactccagctgcttggaaggcatcccaagggcgcatcttaaagttggagcagacctcccttttccagcccctggggccattagaccacgtgctggaactagcattgtaaaattcccatcccagttccactcccctgaagtgaaacccttttttttttgtgacagtaaatcttaaaaatcattgtctctttatgaacatttcctcagtttcttctctgctgaaaatgtaagccatgctactttttaatgtattttgaattttgtgctcattggaaattgatatgctaatgcctcccccaccccccgccagacttttctttttatactttgtcttgtttttactggggtaggctgggcatgcgtgcgtgcctttagggcagcattttaaacctttgccaaaattgcaaatgggacatgtacattcttctgctccatcctacttaaacacctatcagctatttttatctttaaccttttctgtatgtttgaagtgtgtggggggtgtgtgtgtgtgtgaaagagcgagagaatgatgtcatctaaagttttttgaagaattatttggttttcattgcattaaaattctatcactcccagctttgttttcatttaaaaaaatatacaaagagctttgtaaatacaacacattttatttctcccccttcttttaatgtacagcttttttgccacttatatatacttaaaatattcccatgaattatgtccagttcttcttggaaaaaaatttggttttgaatgaacctgcaaagcatcctgcagcgtgagcagctcctccacctggagctccgaagcatcttctcaggccaaagcggcattacccgtgaatctgtcttctccgccacagcatggtttgaggcgcagtctgttaatatagctgggccatgtcagtgactgttgtgtttgtggggtcaggtggggggcatggtatttgcaaaaaaaacaaattatggctaatttattattttgttgcagtggggttaactgtaaactcatgtaagagtctgtgatttcctcattggttgatctctctctctgtaatcctcattgcaaattttcaccaggacagcgttttttgattagaggggagctctggcacagtatgctttaatttagcaggaacttccagatgatttaaattctcgatgctgtgatgacacacatatgatctttcgtgtttctgagcgactctactttcattgtttgccagcgtggctcgttgctgttgcccaataaagcttgtgtacgttctgccttgggggattattttaatttgtacagaaacatgaattctggtatcaaaatgaggactttttattataacgctcctattttttctttatttcatggtacatgaaatgtaaagaaaactctttccagttcagaaaattattttgattttggcaaaaaaaaccccaaatcaatgcatgttatttattattttgtactattgtccatcccagacgtgtcagaatttcaaaaggtgatagatataaatggaaaataagatgaaa

SEQ ID NO: 10896 - protein, 1047 aa, Homo sapiens; identical to SEQ ID NO: 1684

SEQ ID NO: 10897 - DNA, 7177 bp, Homo sapiens
gcggatggacagcaggccccgcgccgggtgctgcgagtggctgagatgctgcggtggaggggaggccaggccccgcactgtctggctggggcaccccgagaagagagaccagaggtatcctcggaatgtcatcaacaatcagaagtacaatttcttcacctttcttcctggggtgctgttcaaccagttcaaatactttttcaacctctatttcttacttcttgcctgctctcagtttgttcccgaaatgagacttggtgcactctatacctactgggttcccctgggcttcgtgctggccgtcactgtcatccgtgaggcggtggaggagatccgatgctacgtgcgggacaaggaagtcaactcccaggtctacagccggctcacagcacgaggtactgttgtgggtgttgttctttacactggcagagaactccggagtgtcatgaatacctcaaatccccgaagtaagatcggcctgttcgacttggaagtgaactgcctcaccaagatcctctttggtgccctggtggtggtctcgctggtcatggttgcccttcagcactttgcaggccgttggtacctgcagatcatccgcttcctcctcttgttttccaacatcatccccattagtttgcgtgtgaacctggacatgggcaagatcgtgtacagctgggtgattcgaagggactcgaaaatccccgggaccgtggttcgctccagcacgattcctgagcagctgggcaggatttcgtacttactcacagacaagacaggcactcttacccagaacgagatgattttcaaacggctccatctcggaacagtagcctacggcctcgactcaatggacgaagtacaaagccacattttcagcatttacacccagcaatcccaggacccaccggctcagaagggcccaacgctcaccactaaggtccggcggaccatgagcagccgcgtgcacgaagccgtgaaggccatcgcgctctgccacaacgtgactcccgtgtatgagtccaacggtgtgactgatcaggctgaggccgagaagcagtacgaagactcctgccgcgtataccaggcatccagccccgatgaggtggccctggtacagtggacggaaagtgtgggcttaaccctggtgggccgagaccagtcttccatgcagctgaggacccctggcgaccagatcctgaacttcaccatcctacagatcttccctttcacctatgaaagcaaacgtatgggcatcatcgtgcgggatgaatcaactggagaaattacgttttacatgaagggagcagatgtggtcatggctggcattgtgcagtacaatgactggttggaggaagagtgtggcaacatggcccgagaagggctgcgggtgctcgtggtggcaaagaagtctcttgcagaggagcagtatcaggactttgaagcccgctacgtccaggccaagctgagtgtgcacgaccgctccctcaaagtggccacggtgatcgagagcctggagatggagatggaactgctgtgcctgacgggcgtggaggaccagctgcaggcagatgtgcggcccacgctggagaccctgaggaatgctggcatcaaggtttggatgctgacaggggacaagctggagacagctacgtgcacagcgaagaatgcacatctggtgaccagaaaccaagacatccacgtttttcggctggtgaccaaccgcggggaggctcacctcgagctgaacgccttccgcaggaagcatgattgtgccctggtcatctcgggagactccctggaggtttgcctcaagtactatgagtacgagttcatggagctggcctgccagtgcccggccgtagtctgctgccgatgtgcccccacccagaaggcccagatcgtgcgcctgcttcaggagcgcacgggcaagctcacctgtgcagtaggggacggaggcaatgacgtcagcatgattcaggaatctgactgcggcgtgggagtggaaggaaaggaaggaaaacaggcttcgttggctgcagacttctccatcactcaatttaagcatcttggccggttgcttatggtgcatggccggaacagctacaagcggtcagccgccctcagccagttcgtgattcacaggagcctctgtatcagcaccatgcaggctgtcttttcctccgtgttttactttgcctccgtccctctctatcaaggattcctcatcattgggtactccacaatttacaccatgtttcctgtgttttctctggtcctggacaaagatgtcaaatcggaagttgccatgctgtatcctgagctctacaaggatcttctcaagggacggccgttgtcctacaagacattcttaatatgggttttgattagcatctatcaagggagcaccatcatgtacggggcgctgctgctgtttgagtcggagttcgtgcacatcgtggccatctccttcacctcgctgatcctcaccgagctgctcatggtggcgctgaccatccagacctggcactggctcatgacagtggcggagctgctcagcctggcctgctacatcgcctccctggtgttcttacacgagttcatcgatgtgtacttcatcgccaccttgtcattcttgtggaaagtctccgtcatcactctggtcagctgcctccccctctatgtcctcaagtacctgcgaagacggttctctccccccagctactcaaagctcacatcataggccgtgcgttcgctggagggggccctggtcttggcgcttccctgatggacagagctcaagttccatttatattaaccgccacctgtggattttgcagtaattgctaacacatgcagttttaatgggaagtggctctgcgcctaaacggagtcctaacgctgcatcaacgggagggagggtcctgaaagagacccatctgggcctgtctgaacccctcgttcttcatgtttaggtgaatatgaatatgttaaagctggtggctcagctgggagatttatatgggtcactgtgcgagcttccttatgacttgaattttgttgtcacatgataaaagtttctgtgtagctgaaggttgtagaaggcttgtgtgtgtgtgtgtgtgtgtgtgtgtgtgtgtgtgtgtttttaaagagtcctaatgtgtatgtactctttatgtctttcttgctcttacaaagaggtgtcagaaaaatagaaagctcttggtgtcggtttgggaggaaaagacagtgacatttggtaaaaagttatccacacaataatctccattcggaaatgctcagtatcgtctccagccagccctgcttatccaggttacactggattcctgggatcgtaaccagtaaatgagaggagagggagagagagtgtcctaagtccaatctgttatccttgatctgattcagcatccatagtgtgtgagttaacttcacctgccacctcgtaaaagaatttcagaggtgtgatcccgctttattgggacctggtaacaatcacaaagccagtggctgtttgagaaggacctcagacattttcagcagagttgttttagcaggaaacgtgccactgaatggcccctaaatgtgtcgacagtgtgataagagactcaactaattctttaggcaacatggcagatgtgactcagatcctccaagaccaaagcggaaaggtcagggggctgggactcttctcttccatagaagcctgtttcctgttaggaggcataatggaagatgaccccacaaaggcagaggcatctttcggaacaacactggtggcagctttcagaacaaggaacccctggtgggaggacgcccaagctacagcgttgggatctgggatctgttccactgccggcagatttcaaggggaacttgctgaaaggcagccagtggtgaagatttctcccctcccaggatggactacatgccggcatgtttcttataaagctgtggctgcttgtttcagaggaagggagtttgcagtcgcgggacgtggtagagcaaggcattcttgggttttcaagttgcttcttgcagaagccacatatgcatgccataagggttaagttggtggatctttaagagccaagtgtggttgagatcttggatttgcgtttacttcttgatgaatacatatccttcaaaccctctgcctggcgctacttctgtgtgcttcagagatgtacatcacagcctggtttctgatgcctactaactcctgctcttggagagctggagacacgaggatcagatagtcccttgcctttggagcactcttgataagcttttgtattttgtgttgtccttttaaaatgttctagaatgactttacgttgcaggtactggttaattggctgttgacaccacatctattttgtcttatgattctgcagttttgcagtacttttctctatctgattcagccatttctgccagagggaaaaggtcggcagaaaagatgtattgagtgaatagttaaggataggatctttgtccaaaaatttcagaaagattgagcaaatctgacgtattcattgagtgagtttctgtgttttcaaaggtggaggagaaatttgtgctggaagtttttaagcctccgttttcttggaaatcagtctgtaacactggcaagtcttaagatagtcccatttagactttgcagatgctgaacctggctctgtaacgctgggaagtcttaagatagtcctgtttagactttgcaaaccctgtacctggctttgctcggagattcgggatgctggctcctgcaggcagggcgtgtgggagcctcgtcagaaagttttagaggtttccagcagaagcagaatgaagatggtctccctggccttttccttaattctcaattttgattgaggtgcacaagttgacttttaaagccaacgcttaagatactgattgacatcttcaagggagaatgctcccaggaggggctgaagaagccatagttggaagtggaaggtactcgtcagtgttctccacaaacctttttactctgttgtctcagccgcactggggcggaggcggtcaagggtgagaagtaccgacactcaagtgcaaactgccacgtcgttggcccatcccatcagtgggcagctggctgacgccattcactggacggtccctgaacacctaggaatgcacacaccgtgcttctcagacactggagacgcaaaggcaggaggatgcagtccggtgagaggacacgatctttacctgcacaatcagactgtaagcccagcagagaaccccaggggcgcctgggtacttctcggaggtcatcttagttgtggtggggaagacaaagaaataagcaaacaagaaactagagttactatacaagaaactctcctgagtttgtaaaccttaagcataaggattcagttgacctttttcttggttcatcaatctggaaagaacttacataaagcgccattgacactgtcacctgggagctccatgggccgtaagtctttgacagccaatttaatttgaggtcagagggccttgaggtacacagtcagcactgtttgaacacttttcctgaaagcaaaactcacagctccctgcgccctctgacaacactagctatttctgccagagtaagaacttctattactattttattattgttcatatgtcttttgatgatggttgtgtgacagggggaagcaggatctatttggtttcttcccctccccccaccccttcctttttgtctctctttttttttctctaagaaaatcaccagactagtttttccatcttgagtaatttcttatgtgggacagttttgatcctcattttgaaagcatgcgtgtgcacatgtgtgttgcctgtggtgccaggtgagacaggtggcactaactccagctgcttggaaggcatcccaagggcgcatcttaaagttggagcagacctcccttttccagcccctggggccattagaccacgtgctggaactagcattgtaaaattcccatcccagttccactcccctgaagtgaaacccttttttttttgtgacagtaaatcttaaaaatcattgtctctttatgaacatttcctcagtttcttctctgctgaaaatgtaagccatgctactttttaatgtattttgaattttgtgctcattggaaattgatatgctaatgcctcccccaccccccgccagacttttctttttatactttgtcttgtttttactggggtaggctgggcatgcgtgcgtgcctttagggcagcattttaaacctttgccaaaattgcaaatgggacatgtacattcttctgctccatcctacttaaacacctatcagctatttttatctttaaccttttctgtatgtttgaagtgtgtggggggtgtgtgtgtgtgtgaaagagcgagagaatgatgtcatctaaagttttttgaagaattatttggttttcattgcattaaaattctatcactcccagctttgttttcatttaaaaaaatatacaaagagctttgtaaatacaacacattttatttctcccccttcttttaatgtacagcttttttgccacttatatatacttaaaatattcccatgaattatgtccagttcttcttggaaaaaaatttggttttgaatgaacctgcaaagcatcctgcagcgtgagcagctcctccacctggagctccgaagcatcttctcaggccaaagcggcattacccgtgaatctgtcttctccgccacagcatggtttgaggcgcagtctgttaatatagctgggccatgtcagtgactgttgtgtttgtggggtcaggtggggggcatggtatttgcaaaaaaaacaaattatggctaatttattattttgttgcagtggggttaactgtaaactcatgtaagagtctgtgatttcctcattggttgatctctctctctgtaatcctcattgcaaattttcaccaggacagcgttttttgattagaggggagctctggcacagtatgctttaatttagcaggaacttccagatgatttaaattctcgatgctgtgatgacacacatatgatctttcgtgtttctgagcgactctactttcattgtttgccagcgtggctcgttgctgttgcccaataaagcttgtgtacgttctgcc

SEQ ID NO: 10898 - protein, 911 aa, Homo sapiens; identical to SEQ ID NO: 10894

SEQ ID NO: 10899 - DNA, 7581 bp, Homo sapiens
atgacggacaacatcccgctgcagccggtgcgccagaagaagcggatggacagcaggccccgcgccgggtgctgcgagtggctgagatgctgcggtggaggggaggccaggccccgcactgtctggctggggcaccccgagaagagagaccagaggtatcctcggaatgtcatcaacaatcagaagtacaatttcttcacctttcttcctggggtgctgttcaaccagttcaaatactttttcaacctctatttcttacttcttgcctgctctcagtttgttcccgaaatgagacttggtgcactctatacctactgggttcccctgggcttcgtgctggccgtcactgtcatccgtgaggcggtggaggagatccgatgctacgtgcgggacaaggaagtcaactcccaggtctacagccggctcacagcacgaggcacagtgaaggtgaagagttctaacatccaagttggagaccttatcatcgttgaaaagaaccagcgggtccctgccgacatgatcttcctgaggacatcagaaaaaaacgggtcatgcttcttgcggacggatcagctggatggggagacggactggaagctgcggcttcccgtggcctgcacgcagaggctccccacggccgccgaccttcttcagattcgatcgtatgtgtacgcagaagagccaaatattgacattcacaacttcgtgggaacttttacccgagaagacagcgaccccccgatcagcgagagcctgagcatagagaacacgctgtgggctggcactgtggtcgcatcaggtactgttgtgggtgttgttctttacactggcagagaactccggagtgtcatgaatacctcaaatccccgaagtaagatcggcctgttcgacttggaagtgaactgcctcaccaagatcctctttggtgccctggtggtggtctcgctggtcatggttgcccttcagcactttgcaggccgttggtacctgcagatcatccgcttcctcctcttgttttccaacatcatccccattagtttgcgtgtgaacctggacatgggcaagatcgtgtacagctgggtgattcgaagggactcgaaaatccccgggaccgtggttcgctccagcacgattcctgagcagctgggcaggatttcgtacttactcacagacaagacaggcactcttacccagaacgagatgattttcaaacggctccatctcggaacagtagcctacggcctcgactcaatggacgaagtacaaagccacattttcagcatttacacccagcaatcccaggacccaccggctcagaagggcccaacgctcaccactaaggtccggcggaccatgagcagccgcgtgcacgaagccgtgaaggccatcgcgctctgccacaacgtgactcccgtgtatgagtccaacggtgtgactgatcaggctgaggccgagaagcagtacgaagactcctgccgcgtataccaggcatccagccccgatgaggtggccctggtacagtggacggaaagtgtgggcttaaccctggtgggccgagaccagtcttccatgcagctgaggacccctggcgaccagatcctgaacttcaccatcctacagatcttccctttcacctatgaaagcaaacgtatgggcatcatcgtgcgggatgaatcaactggagaaattacgttttacatgaagggagcagatgtggtcatggctggcattgtgcagtacaatgactggttggaggaagagtgtggcaacatggcccgagaagggctgcgggtgctcgtggtggcaaagaagtctcttgcagaggagcagtatcaggactttgaagcccgctacgtccaggccaagctgagtgtgcacgaccgctccctcaaagtggccacggtgatcgagagcctggagatggagatggaactgctgtgcctgacgggcgtggaggaccagctgcaggcagatgtgcggcccacgctggagaccctgaggaatgctggcatcaaggtttggatgctgacaggggacaagctggagacagctacgtgcacagcgaagaatgcacatctggtgaccagaaaccaagacatccacgtttttcggctggtgaccaaccgcggggaggctcacctcgagctgaacgccttccgcaggaagcatgattgtgccctggtcatctcgggagactccctggaggtttgcctcaagtactatgagtacgagttcatggagctggcctgccagtgcccggccgtagtctgctgccgatgtgcccccacccagaaggcccagatcgtgcgcctgcttcaggagcgcacgggcaagctcacctgtgcagtaggggacggaggcaatgacgtcagcatgattcaggaatctgactgcggcgtgggagtggaaggaaaggaaggaaaacaggcttcgttggctgcagacttctccatcactcaatttaagcatcttggccggttgcttatggtgcatggccggaacagctacaagcggtcagccgccctcagccagttcgtgattcacaggagcctctgtatcagcaccatgcaggctgtcttttcctccgtgttttactttgcctccgtccctctctatcaaggattcctcatcattgggtactccacaatttacaccatgtttcctgtgttttctctggtcctggacaaagatgtcaaatcggaagttgccatgctgtatcctgagctctacaaggatcttctcaagggacggccgttgtcctacaagacattcttaatatgggttttgattagcatctatcaagggagcaccatcatgtacggggcgctgctgctgtttgagtcggagttcgtgcacatcgtggccatctccttcacctcgctgatcctcaccgagctgctcatggtggcgctgaccatccagacctggcactggctcatgacagtggcggagctgctcagcctggcctgctacatcgcctccctggtgttcttacacgagttcatcgatgtgtacttcatcgccaccttgtcattcttgtggaaagtctccgtcatcactctggtcagctgcctccccctctatgtcctcaagtacctgcgaagacggttctctccccccagctactcaaagctcacatcataggccgtgcgttcgctggagggggccctggtcttggcgcttccctgatggacagagctcaagttccatttatattaaccgccacctgtggattttgcagtaattgctaacacatgcagttttaatgggaagtggctctgcgcctaaacggagtcctaacgctgcatcaacgggagggagggtcctgaaagagacccatctgggcctgtctgaacccctcgttcttcatgtttaggtgaatatgaatatgttaaagctggtggctcagctgggagatttatatgggtcactgtgcgagcttccttatgacttgaattttgttgtcacatgataaaagtttctgtgtagctgaaggttgtagaaggcttgtgtgtgtgtgtgtgtgtgtgtgtgtgtgtgtgtgtgtttttaaagagtcctaatgtgtatgtactctttatgtctttcttgctcttacaaagaggtgtcagaaaaatagaaagctcttggtgtcggtttgggaggaaaagacagtgacatttggtaaaaagttatccacacaataatctccattcggaaatgctcagtatcgtctccagccagccctgcttatccaggttacactggattcctgggatcgtaaccagtaaatgagaggagagggagagagagtgtcctaagtccaatctgttatccttgatctgattcagcatccatagtgtgtgagttaacttcacctgccacctcgtaaaagaatttcagaggtgtgatcccgctttattgggacctggtaacaatcacaaagccagtggctgtttgagaaggacctcagacattttcagcagagttgttttagcaggaaacgtgccactgaatggcccctaaatgtgtcgacagtgtgataagagactcaactaattctttaggcaacatggcagatgtgactcagatcctccaagaccaaagcggaaaggtcagggggctgggactcttctcttccatagaagcctgtttcctgttaggaggcataatggaagatgaccccacaaaggcagaggcatctttcggaacaacactggtggcagctttcagaacaaggaacccctggtgggaggacgcccaagctacagcgttgggatctgggatctgttccactgccggcagatttcaaggggaacttgctgaaaggcagccagtggtgaagatttctcccctcccaggatggactacatgccggcatgtttcttataaagctgtggctgcttgtttcagaggaagggagtttgcagtcgcgggacgtggtagagcaaggcattcttgggttttcaagttgcttcttgcagaagccacatatgcatgccataagggttaagttggtggatctttaagagccaagtgtggttgagatcttggatttgcgtttacttcttgatgaatacatatccttcaaaccctctgcctggcgctacttctgtgtgcttcagagatgtacatcacagcctggtttctgatgcctactaactcctgctcttggagagctggagacacgaggatcagatagtcccttgcctttggagcactcttgataagcttttgtattttgtgttgtccttttaaaatgttctagaatgactttacgttgcaggtactggttaattggctgttgacaccacatctattttgtcttatgattctgcagttttgcagtacttttctctatctgattcagccatttctgccagagggaaaaggtcggcagaaaagatgtattgagtgaatagttaaggataggatctttgtccaaaaatttcagaaagattgagcaaatctgacgtattcattgagtgagtttctgtgttttcaaaggtggaggagaaatttgtgctggaagtttttaagcctccgttttcttggaaatcagtctgtaacactggcaagtcttaagatagtcccatttagactttgcagatgctgaacctggctctgtaacgctgggaagtcttaagatagtcctgtttagactttgcaaaccctgtacctggctttgctcggagattcgggatgctggctcctgcaggcagggcgtgtgggagcctcgtcagaaagttttagaggtttccagcagaagcagaatgaagatggtctccctggccttttccttaattctcaattttgattgaggtgcacaagttgacttttaaagccaacgcttaagatactgattgacatcttcaagggagaatgctcccaggaggggctgaagaagccatagttggaagtggaaggtactcgtcagtgttctccacaaacctttttactctgttgtctcagccgcactggggcggaggcggtcaagggtgagaagtaccgacactcaagtgcaaactgccacgtcgttggcccatcccatcagtgggcagctggctgacgccattcactggacggtccctgaacacctaggaatgcacacaccgtgcttctcagacactggagacgcaaaggcaggaggatgcagtccggtgagaggacacgatctttacctgcacaatcagactgtaagcccagcagagaaccccaggggcgcctgggtacttctcggaggtcatcttagttgtggtggggaagacaaagaaataagcaaacaagaaactagagttactatacaagaaactctcctgagtttgtaaaccttaagcataaggattcagttgacctttttcttggttcatcaatctggaaagaacttacataaagcgccattgacactgtcacctgggagctccatgggccgtaagtctttgacagccaatttaatttgaggtcagagggccttgaggtacacagtcagcactgtttgaacacttttcctgaaagcaaaactcacagctccctgcgccctctgacaacactagctatttctgccagagtaagaacttctattactattttattattgttcatatgtcttttgatgatggttgtgtgacagggggaagcaggatctatttggtttcttcccctccccccaccccttcctttttgtctctctttttttttctctaagaaaatcaccagactagtttttccatcttgagtaatttcttatgtgggacagttttgatcctcattttgaaagcatgcgtgtgcacatgtgtgttgcctgtggtgccaggtgagacaggtggcactaactccagctgcttggaaggcatcccaagggcgcatcttaaagttggagcagacctcccttttccagcccctggggccattagaccacgtgctggaactagcattgtaaaattcccatcccagttccactcccctgaagtgaaacccttttttttttgtgacagtaaatcttaaaaatcattgtctctttatgaacatttcctcagtttcttctctgctgaaaatgtaagccatgctactttttaatgtattttgaattttgtgctcattggaaattgatatgctaatgcctcccccaccccccgccagacttttctttttatactttgtcttgtttttactggggtaggctgggcatgcgtgcgtgcctttagggcagcattttaaacctttgccaaaattgcaaatgggacatgtacattcttctgctccatcctacttaaacacctatcagctatttttatctttaaccttttctgtatgtttgaagtgtgtggggggtgtgtgtgtgtgtgaaagagcgagagaatgatgtcatctaaagttttttgaagaattatttggttttcattgcattaaaattctatcactcccagctttgttttcatttaaaaaaatatacaaagagctttgtaaatacaacacattttatttctcccccttcttttaatgtacagcttttttgccacttatatatacttaaaatattcccatgaattatgtccagttcttcttggaaaaaaatttggttttgaatgaacctgcaaagcatcctgcagcgtgagcagctcctccacctggagctccgaagcatcttctcaggccaaagcggcattacccgtgaatctgtcttctccgccacagcatggtttgaggcgcagtctgttaatatagctgggccatgtcagtgactgttgtgtttgtggggtcaggtggggggcatggtatttgcaaaaaaaacaaattatggctaatttattattttgttgcagtggggttaactgtaaactcatgtaagagtctgtgatttcctcattggttgatctctctctctgtaatcctcattgcaaattttcaccaggacagcgttttttgattagaggggagctctggcacagtatgctttaatttagcaggaacttccagatgatttaaattctcgatgctgtgatgacacacatatgatctttcgtgtttctgagcgactctactttcattgtttgccagcgtggctcgttgctgttgcccaataaagcttgtgtacgttctgcc

SEQ ID NO: 10900 - protein, 1047 aa, Homo sapiens; identical to SEQ ID NO: 1684

SEQ ID NO: 10901 - DNA, 569 bp, Homo sapiens
atcccgctgcagccggtgcgccagaagaagcggatggacagcaggccccgcgccgggtgctgcgagtggctgagatgctgcggtggaggggaggccaggccccgcactgtctggctggggcaccccgagaagagagaccagaggtatcctcggaatgtcatcaacaatcagaagtacaatttcttcacctttcttcctggggtacgtgcaggcagggaccgtgctcttttcttttttccatcacaaatacatgcattggtacagatgttatgtcatgtcatgttattttttagacagagtcttactctgtcgcccaggctggagtgcagtggcgcaatcttggctcactgcaacctccgcctcctgagttcaagcgattctcctgcctcatcctcctgagtagctgggattataggcatgtgccaccacgcgtggctaatttttgtatttttagtagagatggggtttcaccatgttggccaggccggtcttgaactcctgacatcaggtgatccacccacttcagcctctcaaagtgctgggattacagatgtgagccaccttgcccg

SEQ ID NO: 10902 - protein, 121 aa, Homo sapiens
MDSRPRAGCCEWLRCCGGGEARPRTVWLGHPEKRDQRYPRNVINNQKYNFFTFLPGVRAGRDRALFFFPSQIHALVQMLCHVMLFFRQSLTLSPRLECSGAILAHCNLRLLSSSDSPASSS

SEQ ID NO: 10903 - DNA, 1948 bp, Homo sapiens
tcaaacatgtgacaacattaagcaccctggtagaggcaagatttgccaggcggctctcacatacccctgcctcccacaatactacccccgcctcccatgatatgatgagatgacaaggcactttacctctgcattatactccacaaaacccgtaatcccagacaatcatgagaaaacatcagacaaacccagatcagcagacattctacaaaacaccgagtccttcccaacactgtccacggaatgaaaaacaaggaaaatctaagaaatggtcacagacgagagaagactacaagaggcatgatgactgaatgcaagggtctcactctgctgtccaagctggagtgtggtggtgccatcatgactcactgcagccttggcctcccaggctcaagcgatcctcctgcctcggcctccagagtctctgggactacaggcattctcactctttcgctgaggctggcttgcaatggcacgacctcagctcactacaacctctgccttctgagttcaagcgattctcctgcctcagcctcccaagtagctgggattacaggagaaaagactgcagaaccacacaaggctcacgctgcccagggagaacgtcatctcagttcccatatgagtcccgatgaaaatatgacagagaaattctgtcctggaccacgagcatcttttcatcttcgtatcctagcagccagcaggcacttggtgaagaggctgctcaacgaatatacagtgacggttttacgggacaagagttacctgaggaacaactaaatctgccccatcaagcaattcttgacagagtgttgtcaccacacagaatcctcagtttgaaactaacacaaactgaaatgtgcaaaactgaatctgtttctttggggagcacaaaccagtagagcttctatgtgataaaggaagatgctgcagtttgaccgagtttgccaaggagaagatgtccctgggacactgagctacttttttacacatacaggtcaagggtccacgtgtggtccttactgggcgccccctattctgccccgtgtgggaagcatgtgacttgatgctgtacatgtaaaacatggtttctgctcttaagaagtttacaggccagcagggaatggtaaaatgcgtgaggaagaacccctaggctgggcgcggtggctcacacctgtaatcccagtactttgggaggccgaggccagtgcatcacctgaggtcaggagttcaagaccagcctggccaacatgctgaaaccctgtctctactaaaaatacaagaattagccgggcgtggtggcacgtgcctattaccccagctactcaggaggctgaggctggagaattgcttgaacccaggagaaggaggtttcagtgagccgagatcgtgccactgcactcaggctgggcaacaagagcaaaactccgtctcaaaaaaaaaaaaaaaaagaaagaaagaaaaaaaaaacccccgcaactccaggtggattggcactgactactgagcacaccatacatgtgcaaaggaagaaaaagggctgtgatgaagtgaggcaagctggggcctcaactggctgcatctggaatttcaacagcaagacaagaatggactagacagaccagtgttctcacccactgtttccatgatcactctcacaacagaaaaataaaattgacaagaaaaattactcaagaataaggctgggtatggtggctcgcgcctgtaatgctggcattctgggaggccgaggcaggaggatcacttgaggccaggggtttcagaccagcccgggcaacaaagcaaatccctgtctctacaaaaaaataaatttaagttagccaagcgtggtggagtgcatctgtagtctaagatacttgggaggtcaacgcaggaggatcacctcaggccaggagttcaagaccagcctgggcaactccatctctac

SEQ ID NO: 10904 - protein, 178 aa, Homo sapiens [sequence omitted]

SEQ ID NO: 10905 - DNA, 2794 bp, Homo sapiens
ccaagtaacctgaagtcccacagaccacagcagaatgtgggggtccaaggggccgccaccaggcaacagcaatctgagatgtttcctaaaaccagtgtttcccctgcaccggataagacaaaaagacccgagacaaaattgaaacctcttccagtagctccttctcagcccaccctcggcagcagtaacatcaatggttccatcgactaccccgccaagaacgacagcccgtgggcacctccgggaagagactatttctgtaatcggagtgccagcaatactgcagcagaatttggtgagccccttccaaaaagactgaagtccagcgtggttgcccttgacgttgaccagcccggggccaattacagaagaggctatgaccttcccaagtaccatatggtcagaggcatcacatcactgttaccgcaggactgtgtgtatccgtcgcaggcgctgcctcccaaaccaaggttcctgagctccagcgaggtcgattctccaaatgtgctgactgttcagaagccctatggtggctccgggccactttacacttgtgtgcctgctggtagtccagcatccagctcgacgttagaaggtcttggtggatgtcagtgcttactccccatgaaattaaattttacttcatcctttgagaagcgaatggtgaaagctactgaaataagctgtgattgtactgtacataaaacatatgaggaatctgcaaggaacactacagttgtgtaaagttgttctgttaacttttgtaccaaatagcaatacaaactagttggaacagttggaacttacatacatggggactggaaatctctattttgtccctgaataatatttttcttagaattgaccaaataagaagtggaatttttgcatacttgagcgctgctgaaaagaaatcatttgggttgggtggggcgggatgggggaaaagtatataatgcttgcacctcaggtaaaaatctgtaaatatctaagttgtaaacctgcttgttcaaatactgtgtgtattccttttctctaatgcagctcatcacttggagcagtttctgctattgtgctctttcatttaaaatgtatgtttttttttttttaaactgtcaatgattttgtattatgttgaatccacccaaatctattgttgtcttaaaattgttaatggaagtattgaccctctatgatatgtgctgcagatatcgaggtcagccattcggaagctggcagcattttatcgcaactttgagcatctcagatggggaaggcaccttcttcctcgcctctccagattgtcctggaacctccaggatccttgactgagggcgttgggatggcttgtaggatttttaagagagtgtgtctacagacaagcattttctctgtagagcagccacacgttgtataaacataaactgtatgtgcagttatttaaatttgtttctgtcaaattaatcatttttgttggacgattcagtggcgggggggttttgcctaaattagtatataaaaacaaaaatgctaaattatatctgtgaattgcaggtattggggaacagttttaagggaaattttggggggaacattttaggtttgtatttggtagtcttaatgtatctggcatttgggtgaactgtggacatactagagttgattatagacacattgattttgaataaggaactgctggccgagcccgctgggagtctagaaagagaaaatctgtttctagacctcagttattttcccatttttggttgttttgaagcagtaacatttttctcagtgcacatgcaatttgggttttagagaagatggccaccagctggcttcctagatattttaaacttttgttctttaatatgctgtccatggctgagtttattagtacatgggcttagtgaccacaaaatattttattaagaaactgtttcaaaaataaatttgcactgttcatttttctggcctcgctgttctccatagagcaagggtaatcctagaaaaaattttttttttttaaattatgcaacgtaagatgtcctccttgatagaagtcttagctcctgtgttacaagggagaactcatttgagatcagtctgttggcattgcaatgaagtgctttgtatcaggaaagtgtacactattgaccttttttcctgttcacaagctgagccatatgtacataatctagattttgttttcatagttttgcacttttatagcctatttttgaagattaacacatttgcaagatgattgactcaatctttgcctaatccaatgagtgttacagagagcttgctgtgactagaaccataaatcttaaagggggtatgtgataatagagggctggaatttaaacctgtatttaaaaaaaagaatcaccaaatctatttgaaaacaagtcgatttgtattatgctggaattttttgggctttcagatttctctttttaaccacatttctgaatgtataaaaataccaattattttcctacagccctttgtacttcaaaatatgtttttgtgtccatcagtattaactattggtatactactggttttatatttttttttctttgagacaacagtacatataatagaggtacaattcgttggatttttgtttatgtatttatttcattccagtttgatttattttaattgttgatacttaagttgtcgaacagtagacattacttgttttatttatgatatatttcagcttaaagttatgttattatatgtggaagtgtaaatatagatttggtgttttgcaatcttg

SEQ ID NO: 10906 - protein, 221 aa, Homo sapiens
MFPKTSVSPAPDKTKRPETKLKPLPVAPSQPTLGSSNINGSIDYPAKNDSPWAPPGRDYFCNRSASNTAAEFGEPLPKRLKSSVVALDVDQPGANYRRGYDLPKYHMVRGITSLLPQDCVYPSQALPPKPRFLSSSEVDSPNVLTVQKPYGGSGPLYTCVPAGSPASSSTLEGLGGCQCLLPMKLNFTSSFEKRMVKATEISCDCTVHKTYEESARNTTVV

SEQ ID NO: 10907 - DNA, 5711 bp, Homo sapiens
ggtttggaaatcccttgtctccaggttgctgggattgacttcttgctcaattgaaacactcattcaatggagacaaagagaactaatgctttgtgctgattcatatttgaatcgaggcattgggaaccctgtatgccttgtttgtggaaagaaccagtgacaccatcactgagcttcctaaaagttcgaagaagttagaggactatacactttcttttgaacttttataataaatatttgctctggtttttggaacccagggctgttagaggggtgagtgacaagtcttacaagtggccttattccaactccagaaattgcccaacggaactttgagattatatgcaatcgaaagtgacaggaaacatgccaactcaatccctcttaatgtacatggatgggccagaagtgattggcagctctcttggcagtccgatggagatggaggatgccttgtcaatgaaagggaccgctgttgttccattccgagctacacaagaaaaaaatgtcatccaaatcgaggggtatatgcccttggattgcatgttctgcagccagaccttcacacattcagaagaccttaataaacatgtcttaatgcaacaccggcctaccctctgtgaaccagcagttcttcgggttgaagcagagtatctcagtccgcttgataaaagtcaagtgcgaacagaacctcccaaggaaaagaattgcaaggaaaatgaatttagctgtgaggtatgtgggcagacatttagagtcgcttttgatgttgagatccacatgagaacacacaaagattctttcacttacgggtgtaacatgtgcggaagaagattcaaggagccttggtttcttaaaaatcacatgcggacacataatggcaaatcgggggccagaagcaaactgcagcaaggcttggagagtagtccagcaacgatcaacgaggtcgtccaggtgcacgcggccgagagcatctcctctccttacaaaatctgcatggtttgtggcttcctatttccaaataaagaaagtctaattgagcaccgcaaggtgcacaccaaaaaaactgctttcggtaccagcagcgcgcagacagactctccacaaggaggaatgccgtcctcgagggaggacttcctgcagttgttcaacttgagaccaaaatctcaccctgaaacggggaagaagcctgtcagatgcatccctcagctcgatccgttcaccaccttccaggcttggcagctggctaccaaaggaaaagttgccatttgccaagaagtgaaggaatcggggcaagaagggagcaccgacaacgacgattcgagttccgagaaggagcttggagaaacaaataagggcagttgtgcaggcctctcgcaagagaaagagaagtgcaaacactcccacggcgaagcgccctccgtggacgcggatcccaagttacccagtagcaaggagaagcccactcactgctccgagtgcggcaaagctttcagaacctaccaccagctggtcttgcactccagggtccacaagaaggaccggagggccggcgcggagtcgcccaccatgtctgtggacgggaggcagccggggacgtgttctcctgacctcgccgcccctctggatgaaaatggagccgtggatcgaggggaaggtggttctgaagacggatctgaggatgggcttcccgaaggaatccatctggataaaaatgatgatggaggaaaaataaaacatcttacatcttcaagagagtgtagttattgtggaaagtttttccgttcaaattattacctcaatattcatctcagaacgcatacaggtgaaaaaccatacaaatgtgaattttgtgaatatgctgcagcccagaagacatctctgaggtatcacttggagagacatcacaaggaaaaacaaaccgatgttgctgctgaagtcaagaacgatggtaaaaatcaggacactgaagatgcactattaaccgctgacagtgcgcaaaccaaaaatttgaaaagattttttgatggtgccaaagatgttacaggcagtccacctgcaaagcagcttaaggagatgccttctgtttttcagaatgttctgggcagcgctgtcctctcaccagcacacaaagatactcaggatttccataaaaatgcagctgatgacagtgctgataaagtgaataaaaaccctacccctgcttacctggacctgttaaaaaagagatcagcagttgaaactcaggcaaataacctcatctgtagaaccaaggcggatgttactcctcctccggatggcagtaccacccataaccttgaagttagccccaaagagaagcaaacggagaccgcagctgactgcagatacaggccaagtgtggattgtcacgaaaaacctttaaatttatccgtgggggctcttcacaattgcccggcaatttctttgagtaaaagtttgattccaagtatcacctgtccattttgtaccttcaagacattttatccagaagttttaatgatgcaccagagactggagcataaatacaatcctgacgttcataaaaactgtcgaaacaagtccttgcttagaagtcgacgtaccggatgcccgccagcgttgctgggaaaagatgtgcctcccctctctagtttctgtaaacccaagcccaagtctgctttcccggcgcagtccaaatccctgccatctgcgaaggggaagcagagccctcctgggccaggcaaggcccctctgacttcagggatagactctagcactttagccccaagtaacctgaagtcccacagaccacagcagaatgtgggggtccaaggggccgccaccaggcaacagcaatctgagatgtttcctaaaaccagtgtttcccctgcaccggataagacaaaaagacccgagacaaaattgaaacctcttccagtagctccttctcagcccaccctcggcagcagtaacatcaatggttccatcgactaccccgccaagaacgacagcccgtgggcacctccgggaagagactatttctgtaatcggagtgccagcaatactgcagcagaatttggtgagccccttccaaaaagactgaagtccagcgtggttgcccttgacgttgaccagcccggggccaattacagaagaggctatgaccttcccaagtaccatatggtcagaggcatcacatcactgttaccgcaggactgtgtgtatccgtcgcaggcgctgcctcccaaaccaaggttcctgagctccagcgaggtcgattctccaaatgtgctgactgttcagaagccctatggtggctccgggccactttacacttgtgtgcctgctggtagtccagcatccagctcgacgttagaaggaaaaaggcctgtgtcatatcaacacttatctaacagcatggcacaaaagagaaactatgagaattttattgggaatgcacattatcgaccaaatgacaaaaaaacttgattcactaattagggggaaaaaaggtcttggtggatgtcagtgcttactccccatgaaattaaattttacttcatcctttgagaagcgaatggtgaaagctactgaaataagctgtgattgtactgtacataaaacatatgaggaatctgcaaggaacactacagttgtgtaaagttgttctgttaacttttgtaccaaatagcaatacaaactagttggaacagttggaacttacatacatggggactggaaatctctattttgtccctgaataatatttttcttagaattgaccaaataagaagtggaatttttgcatacttgagcgctgctgaaaagaaatcatttgggttgggtggggcgggatgggggaaaagtatataatgcttgcacctcaggtaaaaatctgtaaatatctaagttgtaaacctgcttgttcaaatactgtgtgtattccttttctctaatgcagctcatcacttggagcagtttctgctattgtgctctttcatttaaaatgtatgtttttttttttttaaactgtcaatgattttgtattatgttgaatccacccaaatctattgttgtcttaaaattgttaatggaagtattgaccctctatgatatgtgctgcagatatcgaggtcagccattcggaagctggcagcattttatcgcaactttgagcatctcagatggggaaggcaccttcttcctcgcctctccagattgtcctggaacctccaggatccttgactgagggcgttgggatggcttgtaggatttttaagagagtgtgtctacagacaagcattttctctgtagagcagccacacgttgtataaacataaactgtatgtgcagttatttaaatttgtttctgtcaaattaatcatttttgttggacgattcagtggcgggggggttttgcctaaattagtatataaaaacaaaaatgctaaattatatctgtgaattgcaggtattggggaacagttttaagggaaattttggggggaacattttaggtttgtatttggtagtcttaatgtatctggcatttgggtgaactgtggacatactagagttgattatagacacattgattttgaataaggaactgctggccgagcccgctgggagtctagaaagagaaaatctgtttctagacctcagttattttcccatttttggttgttttgaagcagtaacatttttctcagtgcacatgcaatttgggttttagagaagatggccaccagctggcttcctagatattttaaacttttgttctttaatatgctgtccatggctgagtttattagtacatgggcttagtgaccacaaaatattttattaagaaactgtttcaaaaataaatttgcactgttcatttttctggcctcgctgttctccatagagcaagggtaatcctagaaaaaattttttttttttaaattatgcaacgtaagatgtcctccttgatagaagtcttagctcctgtgttacaagggagaactcatttgagatcagtctgttggcattgcaatgaagtgctttgtatcaggaaagtgtacactattgaccttttttcctgttcacaagctgagccatatgtacataatctagattttgttttcatagttttgcacttttatagcctatttttgaagattaacacatttgcaagatgattgactcaatctttgcctaatccaatgagtgttacagagagcttgctgtgactagaaccataaatcttaaagggggtatgtgataatagagggctggaatttaaacctgtatttaaaaaaaagaatcaccaaatctatttgaaaacaagtcgatttgtattatgctggaattttttgggctttcagatttctctttttaaccacatttctgaatgtataaaaataccaattattttcctacagccctttgtacttcaaaatatgtttttgtgtccatcagtattaactattggtatactactggttttatatttttttttctttgagacaacagtacatataatagaggtacaattcgttggatttttgtttatgtatttatttcattccagtttgatttattttaattgttgatacttaagttgtcgaacagtagacattacttgttttatttatgatatatttcagcttaaagttatgttattatatgtggaagtgtaaatatagatttggtgttttgcaatcttg

SEQ ID NO: 10908 - protein, 1048 aa, Homo sapiens; identical to SEQ ID NO: 1686

SEQ ID NO: 10909 - DNA, 1752 bp, Homo sapiens
attcaaacccggccggcccgagtggtgtcagctcagtcccggccgccgccgcgcgaggaaatggccgaggagccggagccgcagggtttggaaatcccttgtctccaggttgctgggattgacttcttgctcaattgaaacactcattcaatggagacaaagagaactaatgctttgtgctgattcatatttgaatcgaggcattgggaaccctgtatgccttgtttgtggaaagaaccagtgacaccatcactgagcttcctaaaagttcgaagaagttagaggactatacactttcttttgaacttttataataaatatttgctctggtttttggaacccagggctgttagaggggtgagtgacaagtcttacaagtggccttattccaactccagaaattgcccaacggaactttgagattatatgcaatcgaaagtgacaggaaacatgccaactcaatccctcttaatgtacatggatgggccagaagtgattggcagctctcttggcagtccgatggagatggaggatgccttgtcaatgaaagggaccgctgttgttccattccgagctacacaagaaaaaaatgtcatccaaatcgaggggtatatgcccttggattgcatgttctgcagccagaccttcacacattcagaagaccttaataaacatgtcttaatgcaacaccggcctaccctctgtgaaccagcagttcttcgggttgaagcagagtatctcagtccgcttgataaaagtcaagtgcgaacagaacctcccaaggaaaagaattgcaaggaaaatgaatttagctgtgaggtatgtgggcagacatttagagtcgcttttgatgttgagatccacatgagaacacacaaagattctttcacttacgggtgtaacatgtgcggaagaagattcaaggagccttggtttcttaaaaatcacatgcggacacataatggcaaatcgggggccagaagcaaactgcagcaaggcttggagagtagtccagcaacgatcaacgaggtcgtccaggtgcacgcggccgagagcatctcctctccttacaaaatctgcatggtttgtggcttcctatttccaaataaagaaagtctaattgagcaccgcaaggtgcacaccaaaaaaactgctttcggtaccagcagcgcgcagacagactctccacaaggaggaatgccgtcctcgagggaggacttcctgcagttgttcaacttgagaccaaaatctcaccctgaaacggggaagaagcctgtcagatgcatccctcagctcgatccgttcaccaccttccaggcttggcagctggctaccaaaggaaaagttgccatttgccaagaagtgaaggaatcggggcaagaagggagcaccgacaacgacgattcgagttccgagaaggagcttggagaaacaaataagggcagttgtgcaggcctctcgcaagagaaagagaagtgcaaacactcccacggcgaagcgccctccgtggacgcggatcccaagttacccagtagcaaggagaagcccactcactgctccgagtgcggcaaagctttcagaacctaccaccagctggtcttgcactccagggtccacaagaaggaccggagggccggcgcggagtcgcccaccatgtctgtggacgggaggcagccggggacgtgttctcctgacctcgccgcccctctggatgaaaatggagccgtggatcgaggggaaggtggttctgaa

SEQ ID NO: 10910 - protein, 441 aa, Homo sapiens
MQSKVTGNMPTQSLLMYMDGPEVIGSSLGSPMEMEDALSMKGTAVVPFRATQEKNVIQIEGYMPLDCMFCSQTFTHSEDLNKHVLMQHRPTLCEPAVLRVEAEYLSPLDKSQVRTEPPKEKNCKENEFSCEVCGQTFRVAFDVEIHMRTHKDSFTYGCNMCGRRFKEPWFLKNHMRTHNGKSGARSKLQQGLESSPATINEVVQVHAAESISSPYKICMVCGFLFPNKESLIEHRKVHTKKTAFGTSSAQTDSPQGGMPSSREDFLQLFNLRPKSHPETGKKPVRCIPQLDPFTTFQAWQLATKGKVAICQEVKESGQEGSTDNDDSSSEKELGETNKGSCAGLSQEKEKCKHSHGEAPSVDADPKLPSSKEKPTHCSECGKAFRTYHQLVLHSRVHKKDRRAGAESPTMSVDGRQPGTCSPDLAAPLDENGAVDRGEGGS

SEQ ID NO: 10911 - DNA, 1824 bp, Homo sapiens
tctgacccaacagtcccccagcgccggacgcgccgcgccccggcggctctagggaccccccgcgcctgcactgtccccgcgcggacgagtagggggcgcccgcgcctttgcccccgtgcgcacccccgccccgctcaccttagccccgcgcccgagggtttggaaatcccttgtctccaggttgctgggattgacttcttgctcaattgaaacactcattcaatggagacaaagagaactaatgctttgtgctgattcatatttgaatcgaggcattgggaaccctgtatgccttgtttgtggaaagaaccagtgacaccatcactgagcttcctaaaagttcgaagaagttagaggactatacactttcttttgaacttttataataaatatttgctctggtttttggaacccagggctgttagaggggtgagtgacaagtcttacaagtggccttattccaactccagaaattgcccaacggaactttgagattatatgcaatcgaaagtgacaggaaacatgccaactcaatccctcttaatgtacatggatgggccagaagtgattggcagctctcttggcagtccgatggagatggaggatgccttgtcaatgaaagggaccgctgttgttccattccgagctacacaagaaaaaaatgtcatccaaatcgaggggtatatgcccttggattgcatgttctgcagccagaccttcacacattcagaagaccttaataaacatgtcttaatgcaacaccggcctaccctctgtgaaccagcagttcttcgggttgaagcagagtatctcagtccgcttgataaaagtcaagtgcgaacagaacctcccaaggaaaagaattgcaaggaaaatgaatttagctgtgaggtatgtgggcagacatttagagtcgcttttgatgttgagatccacatgagaacacacaaagattctttcacttacgggtgtaacatgtgcggaagaagattcaaggagccttggtttcttaaaaatcacatgcggacacataatggcaaatcgggggccagaagcaaactgcagcaaggcttggagagtagtccagcaacgatcaacgaggtcgtccaggtgcacgcggccgagagcatctcctctccttacaaaatctgcatggtttgtggcttcctatttccaaataaagaaagtctaattgagcaccgcaaggtgcacaccaaaaaaactgctttcggtaccagcagcgcgcagacagactctccacaaggaggaatgccgtcctcgagggaggacttcctgcagttgttcaacttgagaccaaaatctcaccctgaaacggggaagaagcctgtcagatgcatccctcagctcgatccgttcaccaccttccaggcttggcagctggctaccaaaggaaaagttgccatttgccaagaagtgaaggaatcggggcaagaagggagcaccgacaacgacgattcgagttccgagaaggagcttggagaaacaaataagggcagttgtgcaggcctctcgcaagagaaagagaagtgcaaacactcccacggcgaagcgccctccgtggacgcggatcccaagttacccagtagcaaggagaagcccactcactgctccgagtgcggcaaagctttcagaacctaccaccagctggtcttgcactccagggtccacaagaaggaccggagggccggcgcggagtcgcccaccatgtctgtggacgggaggcagccggggacgtgttctcctgacctcgccgcccctctggatgaaaatggagccgtggatcgaggggaaggtggttctgaa

SEQ ID NO: 10912 - protein, 441 aa, Homo sapiens; identical to SEQ ID NO: 10910

SEQ ID NO: 10913 - DNA, 2008 bp, Homo sapiens
ggctgagggcggcggcaggatttgaatccaggcggtctctggagactgggttctgagaaaacccgctgtgtgagggctggggggaccgctttaagccctccgctggaagcggtgaagaagctttgggccaacgcagttcggagcgccagtgtagacgcgtggcttcagtttgtcctgcctggctcgacctccactttggagaagatgctccaggaacactgaagggcaggtcgtccccgaccttctatgaggattgcccagctcaagtattgtttggagccaggtagagtgaagtcctacagagttatcaggttccagaccctgccttctcttctgaaagggtttggaaatcccttgtctccaggttgctgggattgacttcttgctcaattgaaacactcattcaatggagacaaagagaactaatgctttgtgctgattcatatttgaatcgaggcattgggaaccctgtatgccttgtttgtggaaagaaccagtgacaccatcactgagcttcctaaaagttcgaagaagttagaggactatacactttcttttgaacttttataataaatatttgctctggtttttggaacccagggctgttagaggggtgagtgacaagtcttacaagtggccttattccaactccagaaattgcccaacggaactttgagattatatgcaatcgaaagtgacaggaaacatgccaactcaatccctcttaatgtacatggatgggccagaagtgattggcagctctcttggcagtccgatggagatggaggatgccttgtcaatgaaagggaccgctgttgttccattccgagctacacaagaaaaaaatgtcatccaaatcgaggggtatatgcccttggattgcatgttctgcagccagaccttcacacattcagaagaccttaataaacatgtcttaatgcaacaccggcctaccctctgtgaaccagcagttcttcgggttgaagcagagtatctcagtccgcttgataaaagtcaagtgcgaacagaacctcccaaggaaaagaattgcaaggaaaatgaatttagctgtgaggtatgtgggcagacatttagagtcgcttttgatgttgagatccacatgagaacacacaaagattctttcacttacgggtgtaacatgtgcggaagaagattcaaggagccttggtttcttaaaaatcacatgcggacacataatggcaaatcgggggccagaagcaaactgcagcaaggcttggagagtagtccagcaacgatcaacgaggtcgtccaggtgcacgcggccgagagcatctcctctccttacaaaatctgcatggtttgtggcttcctatttccaaataaagaaagtctaattgagcaccgcaaggtgcacaccaaaaaaactgctttcggtaccagcagcgcgcagacagactctccacaaggaggaatgccgtcctcgagggaggacttcctgcagttgttcaacttgagaccaaaatctcaccctgaaacggggaagaagcctgtcagatgcatccctcagctcgatccgttcaccaccttccaggcttggcagctggctaccaaaggaaaagttgccatttgccaagaagtgaaggaatcggggcaagaagggagcaccgacaacgacgattcgagttccgagaaggagcttggagaaacaaataagggcagttgtgcaggcctctcgcaagagaaagagaagtgcaaacactcccacggcgaagcgccctccgtggacgcggatcccaagttacccagtagcaaggagaagcccactcactgctccgagtgcggcaaagctttcagaacctaccaccagctggtcttgcactccagggtccacaagaaggaccggagggccggcgcggagtcgcccaccatgtctgtggacgggaggcagccggggacgtgttctcctgacctcgccgcccctctggatgaaaatggagccgtggatcgaggggaaggtggttctgaa

SEQ ID NO: 10914 - protein, 43 aa, Homo sapiens
MRIAQLKYCLEPGRVKSYRVIRFQTLPSLLKGFGNPLSPGCWD

SEQ ID NO: 10915 - DNA, 1970 bp, Homo sapiens
aacaggaagccttccggggcgaatcctggctaacgtcattttggcggacgtttattgcgtatcgccatgtgccaggcaccgttttaaggcttcatggtgatgagggcatttaaccctcgggacacgcccattctgcaggcctggctcgacctccactttggagaagatgctccaggaacactgaagggcaggtcgtccccgaccttctatgaggattgcccagctcaagtattgtttggagccaggtagagtgaagtcctacagagttatcaggttccagaccctgccttctcttctgaaagggtttggaaatcccttgtctccaggttgctgggattgacttcttgctcaattgaaacactcattcaatggagacaaagagaactaatgctttgtgctgattcatatttgaatcgaggcattgggaaccctgtatgccttgtttgtggaaagaaccagtgacaccatcactgagcttcctaaaagttcgaagaagttagaggactatacactttcttttgaacttttataataaatatttgctctggtttttggaacccagggctgttagaggggtgagtgacaagtcttacaagtggccttattccaactccagaaattgcccaacggaactttgagattatatgcaatcgaaagtgacaggaaacatgccaactcaatccctcttaatgtacatggatgggccagaagtgattggcagctctcttggcagtccgatggagatggaggatgccttgtcaatgaaagggaccgctgttgttccattccgagctacacaagaaaaaaatgtcatccaaatcgaggggtatatgcccttggattgcatgttctgcagccagaccttcacacattcagaagaccttaataaacatgtcttaatgcaacaccggcctaccctctgtgaaccagcagttcttcgggttgaagcagagtatctcagtccgcttgataaaagtcaagtgcgaacagaacctcccaaggaaaagaattgcaaggaaaatgaatttagctgtgaggtatgtgggcagacatttagagtcgcttttgatgttgagatccacatgagaacacacaaagattctttcacttacgggtgtaacatgtgcggaagaagattcaaggagccttggtttcttaaaaatcacatgcggacacataatggcaaatcgggggccagaagcaaactgcagcaaggcttggagagtagtccagcaacgatcaacgaggtcgtccaggtgcacgcggccgagagcatctcctctccttacaaaatctgcatggtttgtggcttcctatttccaaataaagaaagtctaattgagcaccgcaaggtgcacaccaaaaaaactgctttcggtaccagcagcgcgcagacagactctccacaaggaggaatgccgtcctcgagggaggacttcctgcagttgttcaacttgagaccaaaatctcaccctgaaacggggaagaagcctgtcagatgcatccctcagctcgatccgttcaccaccttccaggcttggcagctggctaccaaaggaaaagttgccatttgccaagaagtgaaggaatcggggcaagaagggagcaccgacaacgacgattcgagttccgagaaggagcttggagaaacaaataagggcagttgtgcaggcctctcgcaagagaaagagaagtgcaaacactcccacggcgaagcgccctccgtggacgcggatcccaagttacccagtagcaaggagaagcccactcactgctccgagtgcggcaaagctttcagaacctaccaccagctggtcttgcactccagggtccacaagaaggaccggagggccggcgcggagtcgcccaccatgtctgtggacgggaggcagccggggacgtgttctcctgacctcgccgcccctctggatgaaaatggagccgtggatcgaggggaaggtggttctgaa

SEQ ID NO: 10916 - protein, 51 aa, Homo sapiens
MVMRAFNPRDTPILQAWLDLHFGEDAPGTLKGRSSPTFYEDCPAQVLFGAR

SEQ ID NO: 10917 - DNA, 1992 bp, Homo sapiens
aaccacaaagtaactttgattaaaggaggaaactggtctacttgttgaaaatgtggtaatgagatagtttccacccagccgggaagcgtggcccggagggggaggggagcctgcatttcttcatgcctctacccatcctgaagaaggtagaaaggaacaggcctggctcgacctccactttggagaagatgctccaggaacactgaagggcaggtcgtccccgaccttctatgaggattgcccagctcaagtattgtttggagccaggtagagtgaagtcctacagagttatcaggttccagaccctgccttctcttctgaaagggtttggaaatcccttgtctccaggttgctgggattgacttcttgctcaattgaaacactcattcaatggagacaaagagaactaatgctttgtgctgattcatatttgaatcgaggcattgggaaccctgtatgccttgtttgtggaaagaaccagtgacaccatcactgagcttcctaaaagttcgaagaagttagaggactatacactttcttttgaacttttataataaatatttgctctggtttttggaacccagggctgttagaggggtgagtgacaagtcttacaagtggccttattccaactccagaaattgcccaacggaactttgagattatatgcaatcgaaagtgacaggaaacatgccaactcaatccctcttaatgtacatggatgggccagaagtgattggcagctctcttggcagtccgatggagatggaggatgccttgtcaatgaaagggaccgctgttgttccattccgagctacacaagaaaaaaatgtcatccaaatcgaggggtatatgcccttggattgcatgttctgcagccagaccttcacacattcagaagaccttaataaacatgtcttaatgcaacaccggcctaccctctgtgaaccagcagttcttcgggttgaagcagagtatctcagtccgcttgataaaagtcaagtgcgaacagaacctcccaaggaaaagaattgcaaggaaaatgaatttagctgtgaggtatgtgggcagacatttagagtcgcttttgatgttgagatccacatgagaacacacaaagattctttcacttacgggtgtaacatgtgcggaagaagattcaaggagccttggtttcttaaaaatcacatgcggacacataatggcaaatcgggggccagaagcaaactgcagcaaggcttggagagtagtccagcaacgatcaacgaggtcgtccaggtgcacgcggccgagagcatctcctctccttacaaaatctgcatggtttgtggcttcctatttccaaataaagaaagtctaattgagcaccgcaaggtgcacaccaaaaaaactgctttcggtaccagcagcgcgcagacagactctccacaaggaggaatgccgtcctcgagggaggacttcctgcagttgttcaacttgagaccaaaatctcaccctgaaacggggaagaagcctgtcagatgcatccctcagctcgatccgttcaccaccttccaggcttggcagctggctaccaaaggaaaagttgccatttgccaagaagtgaaggaatcggggcaagaagggagcaccgacaacgacgattcgagttccgagaaggagcttggagaaacaaataagggcagttgtgcaggcctctcgcaagagaaagagaagtgcaaacactcccacggcgaagcgccctccgtggacgcggatcccaagttacccagtagcaaggagaagcccactcactgctccgagtgcggcaaagctttcagaacctaccaccagctggtcttgcactccagggtccacaagaaggaccggagggccggcgcggagtcgcccaccatgtctgtggacgggaggcagccggggacgtgttctcctgacctcgccgcccctctggatgaaaatggagccgtggatcgaggggaaggtggttctgaa

SEQ ID NO: 10918 - protein, 43 aa, Homo sapiens; identical to SEQ ID NO: 10914

SEQ ID NO: 10919 - DNA, 381 bp, Homo sapiens
cttgagctgggcaatcctcatagaaggtcggggacgacctgcccttcagtgttcctggagcatcttctccaaagtggaggtcgagccaggcctaggaggaaagagagggcaactgcggacgaccccaccgcagaagaggtgaaaccgacgggctccagggctttttcactcattccctaggcatgtgggacctcgaagatgccgaatcagctaaacgggaggtggcttgagtaggatttgctgccagctaaagcgtgagatgctattgcatgtgcaaggcaaggctttcttcagcggcatcatcttccaaaatagcccagtgagcatgcctttctcctgaaaaataaaaaatagttggtgtttactgcaatcgtatggcaa

SEQ ID NO: 10920 - protein, 59 aa, Homo sapiens
LELGNPHRRSGTTCPSVFLEHLLQSGGRARPRRKERATADDPTAEEVKPTGSRAFSLIP

SEQ ID NO: 10921 - DNA, 510 bp, Homo sapiens
aacgagaccgtgcatttagagcatgtaggcaccgtgtctggcaggtaatgagtgctcagtcagcttattgatgaggatgcagatgacctcagcctgagatagaacagatgtgttctctttcatggactgaaggccacccagactttgcgacatccttaaactttgccccagtttctccttatcctcataagcagttggctggctggcttatctagaaaaaagaaaggagggaggagaaaaagcaaagaaaaatgttcattttccctgctgttcaccccattctaaagtaaggcagaatttctggagagggggctcaggtccacccttggctatccttggttgtacagttgcatctacttataacggtggccaagtcgccatggcagtaggtgctgtggctgccctgccccatcgtcttcagactacccgagtttacctgcagcactgacagcttcccaccccaccttttgtgcttcctgggatcacttcccaaataaactacttgcacct

SEQ ID NO: 10922 - protein, 35 aa, Homo sapiens
MCSLSWTEGHPDFATSLNFAPVSPYPHKQLAGWLI

SEQ ID NO: 10923 - DNA, 537 bp, Homo sapiens
agctgggggccattttgtcaagaagtgcttatttggaaaaacaaaacaaaacaaaaaatgaaaaaaaaaaaaaaaatctatacaggtgcatgccagtcccccggtaatgaaatgtaacaaaggaagcacttaagttcagtgagggaaatacagctttaaattacagattgtacccagagcactttataaacggtaatgtgtgataatgtattatccttacttctgtgaaattgtggactgcaacttctgccggggccagttaaagggccaggagatggagagggttgcgtgaatgccattcaagaaaagggcaacagaggctaaggggttaaactccccagaaaaccaatttatgcaaagggctggatcctgaccggcattctgcactaaagatctgaattacaaatttagagaatttgctgctcgacaacgaatgcaggaaggacctcactggctgctgggaacaactgcccttttgaatgaattcttttatggttaccagtcaaaaagtcaccgtcagctggaactggaagggag

SEQ ID NO: 10924 - protein, 33 aa, Homo sapiens
MQEGPHWLLGTTALLNEFFYGYQSKSHRQLELE

SEQ ID NO: 10925 - DNA, 398 bp, Homo sapiens
gacaacgaatgcaggaaggacctcactggctgctgggaacaactgcccttttgaatgaattcttttatggttaccagtcaaaaagtcaccgtcagctggaactggaagggaggggcatttcttatctgggcaaaaagcccctgtacccagcgaggtgaaacttgcaaatgatactgtcaccttcctcaatggactgcagctcaggagctcaccaaaggttgcagcagacaacccccacggtgtttggagacaaaggaatagcagctgcctggtttccttgaatcaccccgtgctctgacgatggcagtgatgggcctcccaccaatggcttccccaagtgctgttttcctgcttcatgccaagttaagcattctgatactaagcggcacgagatagtt

SEQ ID NO: 10926 - protein, 49 aa, Homo sapiens
MQEGPHWLLGTTALLNEFFYGYQSKSHRQLELEGRGISYLGKKPLYPAR

SEQ ID NO: 10927 - DNA, 3069 bp, Homo sapiens
gtattcagccagcaggctctgcacaaggaagcaaagtgcagggagccaggctccaccgacagccaggcactgggcagcacgcactggagacccaggaccctgtgcaggagcagctccgggtgacacgaggggactgaagatactcccacaggggctcagcaggagcaatgggtaaccaaatgagtgttccccaaagagttgaagaccaagagaatgaaccagaagcagagacttaccaggacaacgcgtctgctctgaacggggttccagtggtggtgtcgacccacacagttcagcacttagaggaagtcgacttgggaataagtgtcaagacggataatgtggccacttcttcccccgagacaacggagataagtgctgttgcggatgccaacggaaagaatcttgggaaagaggccaaacccgaggcaccagctgctaaatctcgttttttcttgatgctctctcggcctgtaccaggacgtaccggagaccaagccgcagattcatcccttggatcagtgaagcttgatgtcagctccaataaagctccagcgaacaaagacccaagtgagagctggacacttccggtggcagctggaccggggcaggacacagataaaaccccagggcacgccccggcccaagacaaggtcctctctgccgccagggatcccacgcttctcccacctgagacagggggagcaggaggagaagctccctccaagcccaaggactccagcttttttgacaaattcttcaagctggacaagggacaggaaaaggtgccaggtgacagccaacaggaagccaagagggcagagcatcaagacaaggtggatgaggttcctggcttatcagggcagtccgatgatgtccctgcagggaaggacatagttgacggcaaggaaaaagaaggacaagaacttggaactgcggattgctctgtccctggggacccagaaggactggagactgcaaaggacgattcccaggcagcagctatagcagagaataataattccatcatgagtttctttaaaactctggtttcacctaacaaagctgaaacaaaaaaggacccagaagacacgggtgctgaaaagtcacccaccacttcagctgaccttaagtcagacaaagccaactttacatcccaggagacccaaggggctggcaagaattccaaaggatgcaacccatcggggcacacacagtccgtgacaacccctgaacctgcgaaggaaggcaccaaggagaaatcaggacccacctctctgcctctgggcaaactgttttggaaaaagtcagttaaagaggactcagtccccacaggtgcggaggagaatacatcagactccacagaaaagactatcacaccgccagagcctgaaccaacaggagcaccacagaagggtaaagagggctcctcgaaggacaagaagtcagcagccgagatgaacaagcagaagagcaacaagcaggaagccaaagaaccagcccagtgcacagagcaggccacggtggacacgaactcactgcagaatggggacaagctccaaaagagacctgagaagcggcagcagtcccttgggggcttctttaaaggcctgggaccaaagcggatgttggatgctcaagtgcaaacagacccagtatccatcggaccagttggcaaatccaagtaaacaaatcagcacggttcccaccaggttctcctgccaccaagatgtgttctccttactccatctcctccccaaacacgctccatgtatatattcttctgatggccagcaaatgaaattctgcctagaaattaagcccgagctgttgtatattgaggtgtattatttacgtctctggtccagtcttttctggcaaataacagtaaagatggtttagcaggtcacctagttgggtcagaagagtcgatgatcaccaagcaggaaagggagggaatagaggaatgtgttcgggttaagtgatgaaaatggcagtggtggccgggcgtggtggctctcgcctgtaatctcagcactttgggaggccgaggcaggtggatcacctgaggtcaggagttcaagactagcctggccaacatcatgaaaccccgtctctactaaaaatacaaaaattagccaggcatggtggcacacacctgtagtcccagctactcgggagcccaacgcacgagaaccgcttgtacccaggaggtggaggttgcagtgagccgaagttgcaccattgcactccaccctgggcgacagagcaagattctatcaaaaaaaaaaaaaggcagtggcaagtaagttatagaagagaaatgctgctagaaggaattaagcgttgtagtaaatgcgtgcttatcctctaagcttgaagaagggagacgaaaatccatttgtttaaattcacatctcaaggagggagaacccgggctgtgttgggtggttgccaatttcctagaacggaatgtgtggggtatagaaaaaggaatgaataagcgttgtttttcaaatagggtccttgtaagttattgatgagagggaaaagattgactggggagggcttaaaatgatttgggaaaacaattgcttttgaggctcagtgacaacggcaaagattacaacttaaaaaaaaaaaataaataaaaaataaaggaagttgcacggttattttgcaacacaagggggcggcaaggtccccatttttatcctgtaatactgtatccctaacaaagatttggtctctgctatcttacattattaatgtttctcagatggctgaggggctcgcttcatctgttccgtctgacacttatctcaagtgtgtctgtcattcctaatgttctcaggatgtgctctgataaaaccctccccataacctcagttaataaaaatttacagaagacttctcaaatacctgagttgtttttaatacctgtacaaaggagtaaataggaccctgagtctattaaaatgtaattcaaagtagcatatgattgactgacagtcatgtaaactgtatctttctttttctgatttaataaaaaatacatttacttctaaa

SEQ ID NO: 10928 - protein, 506 aa, Homo sapiens
MGNQMSVPQRVEDQENEPEAETYQDNASALNGVPVVVSTHTVQHLEEVDLGISVKTDNVATSSPETTEISAVADANGKNLGKEAKPEAPAAKSRFFLMLSRPVPGRTGDQAADSSLGSVKLDVSSNKAPANKDPSESWTLPVAAGPGQDTDKTPGHAPAQDKVLSAARDPTLLPPETGGAGGEAPSKPKDSSFFDKFFKLDKGQEKVPGDSQQEAKRAEHQDKVDEVPGLSGQSDDVPAGKDIVDGKEKEGQELGTADCSVPGDPEGLETAKDDSQAAAIAENNNSIMSFFKTLVSPNKAETKKDPEDTGAEKSPTTSADLKSDKANFTSQETQGAGKNSKGCNPSGHTQSVTTPEPAKEGTKEKSGPTSLPLGKLFWKKSVKEDSVPTGAEENTSDSTEKTITPPEPEPTGAPQKGKEGSSKDKKSAAEMNKQKSNKQEAKEPAQCTEQATVDTNSLQNGDKLQKRPEKRQQSLGGFFKGLGPKRMLDAQVQTDPVSIGPVGKSK

SEQ ID NO: 10929 - DNA, 3303 bp, Homo sapiens
gtattcagccagcaggctctgcacaaggaagcaaagtgcagggagccaggctccaccgacagccaggcactgggcagcacgcactggagacccaggaccctgtgcaggagcagctccgggtgacacgaggggactgaagatactcccacaggggctcagcaggagcaatgggtaaccaaatgagtgttccccaaagagttgaagaccaagagaatgaaccagaagcagagacttaccaggacaacgcgtctgctctgaacggggttccagtggtggtgtcgacccacacagttcagcacttagaggaagtcgacttgggaataagtgtcaagacggataatgtggccacttcttcccccgagacaacggagataagtgctgttgcggatgccaacggaaagaatcttgggaaagaggccaaacccgaggcaccagctgctaaatctcgttttttcttgatgctctctcggcctgtaccaggacgtaccggagaccaagccgcagattcatcccttggatcagtgaagcttgatgtcagctccaataaagctccagcgaacaaagacccaagtgagagctggacacttccggtggcagctggaccggggcaggacacagataaaaccccagggcacgccccggcccaagacaaggtcctctctgccgccagggatcccacgcttctcccacctgagacagggggagcaggaggagaagctccctccaagcccaaggactccagcttttttgacaaattcttcaagctggacaagggacaggaaaaggtgccaggtgacagccaacaggaagccaagagggcagagcatcaagacaaggtggatgaggttcctggcttatcagggcagtccgatgatgtccctgcagggaaggacatagttgacggcaaggaaaaagaaggacaagaacttggaactgcggattgctctgtccctggggacccagaaggactggagactgcaaaggacgattcccaggcagcagctatagcagagaataataattccatcatgagtttctttaaaactctggtttcacctaacaaagctgaaacaaaaaaggacccagaagacacgggtgctgaaaagtcacccaccacttcagctgaccttaagtcagacaaagccaactttacatcccaggagacccaaggggctggcaagaattccaaaggatgcaacccatcggggcacacacagtccgtgacaacccctgaacctgcgaaggaaggcaccaaggagaaatcaggacccacctctctgcctctgggcaaactgttttggaaaaagtcagttaaagaggactcagtccccacaggtgcggaggagaatgtggtgtgtgagtcaccagtagagattataaagtccaaggaagtagaatcagccttacaaacagtggacctcaacgaaggagatgctgcacctgaacccacagaagcgaaactcaaaagagaagaaagcaaaccaagaacctctctgatggcgtttctcagacaaatgtcagtgaaaggggatggagggatcacccactcagaagaaataaatgggaaagactccagctgccaaacatcagactccacagaaaagactatcacaccgccagagcctgaaccaacaggagcaccacagaagggtaaagagggctcctcgaaggacaagaagtcagcagccgagatgaacaagcagaagagcaacaagcaggaagccaaagaaccagcccagtgcacagagcaggccacggtggacacgaactcactgcagaatggggacaagctccaaaagagacctgagaagcggcagcagtcccttgggggcttctttaaaggcctgggaccaaagcggatgttggatgctcaagtgcaaacagacccagtatccatcggaccagttggcaaatccaagtaaacaaatcagcacggttcccaccaggttctcctgccaccaagatgtgttctccttactccatctcctccccaaacacgctccatgtatatattcttctgatggccagcaaatgaaattctgcctagaaattaagcccgagctgttgtatattgaggtgtattatttacgtctctggtccagtcttttctggcaaataacagtaaagatggtttagcaggtcacctagttgggtcagaagagtcgatgatcaccaagcaggaaagggagggaatagaggaatgtgttcgggttaagtgatgaaaatggcagtggtggccgggcgtggtggctctcgcctgtaatctcagcactttgggaggccgaggcaggtggatcacctgaggtcaggagttcaagactagcctggccaacatcatgaaaccccgtctctactaaaaatacaaaaattagccaggcatggtggcacacacctgtagtcccagctactcgggagcccaacgcacgagaaccgcttgtacccaggaggtggaggttgcagtgagccgaagttgcaccattgcactccaccctgggcgacagagcaagattctatcaaaaaaaaaaaaaggcagtggcaagtaagttatagaagagaaatgctgctagaaggaattaagcgttgtagtaaatgcgtgcttatcctctaagcttgaagaagggagacgaaaatccatttgtttaaattcacatctcaaggagggagaacccgggctgtgttgggtggttgccaatttcctagaacggaatgtgtggggtatagaaaaaggaatgaataagcgttgtttttcaaatagggtccttgtaagttattgatgagagggaaaagattgactggggagggcttaaaatgatttgggaaaacaattgcttttgaggctcagtgacaacggcaaagattacaacttaaaaaaaaaaaataaataaaaaataaaggaagttgcacggttattttgcaacacaagggggcggcaaggtccccatttttatcctgtaatactgtatccctaacaaagatttggtctctgctatcttacattattaatgtttctcagatggctgaggggctcgcttcatctgttccgtctgacacttatctcaagtgtgtctgtcattcctaatgttctcaggatgtgctctgataaaaccctccccataacctcagttaataaaaatttacagaagacttctcaaatacctgagttgtttttaatacctgtacaaaggagtaaataggaccctgagtctattaaaatgtaattcaaagtagcatatgattgactgacagtcatgtaaactgtatctttctttttctgatttaataaaaaatacatttacttctaaa

SEQ ID NO: 10930 - protein, 584 aa, Homo sapiens
MGNQMSVPQRVEDQENEPEAETYQDNASALNGVPVVVSTHTVQHLEEVDLGISVKTDNVATSSPETTEISAVADANGKNLGKEAKPEAPAAKSRFFLMLSRPVPGRTGDQAADSSLGSVKLDVSSNKAPANKDPSESWTLPVAAGPGQDTDKTPGHAPAQDKVLSAARDPTLLPPETGGAGGEAPSKPKDSSFFDKFFKLDKGQEKVPGDSQQEAKRAEHQDKVDEVPGLSGQSDDVPAGKDIVDGKEKEGQELGTADCSVPGDPEGLETAKDDSQAAAIAENNNSIMSFFKTLVSPNKAETKKDPEDTGAEKSPTTSADLKSDKANFTSQETQGAGKNSKGCNPSGHTQSVTTPEPAKEGTKEKSGPTSLPLGKLFWKKSVKEDSVPTGAEENVVCESPVEIIKSKEVESALQTVDLNEGDAAPEPTEAKLKREESKPRTSLMAFLRQMSVKGDGGITHSEEINGKDSSCQTSDSTEKTITPPEPEPTGAPQKGKEGSSKDKKSAAEMNKQKSNKQEAKEPAQCTEQATVDTNSLQNGDKLQKRPEKRQQSLGGFFKGLGPKRMLDAQVQTDPVSIGPVGKSK

SEQ ID NO: 10931 - DNA, 313 bp, Homo sapiens
aggacaacgcgtctgctctgaacggggttccagtggtggtgtcgacccacacagttcagcaacttatctcaagtgtgtctgtcattcctaatgttctcaggatgtgctctgataaaaccctccccataacctcagttaataaaaatttacagaagacttctcaaatacctgagttgtttttaatacctgtacaaaggagtaaataggaccctgagtctattaaaatgtaattcaaagtagcatatgattgactgacagtcatgtaaactgtatctttctttttctgatttaataaaaaatacatttacttcta

SEQ ID NO: 10932 - protein, 34 aa, Homo sapiens
MCSDKTLPITSVNKNLQKTSQIPELFLIPVQRSK

SEQ ID NO: 10933 - DNA, 732 bp, Homo sapiens
gagcatgctctgaatgacagtccccaaaaaggacctcttatctgttcttccccttggggaagggattttgccacttccatgtcaatgtggcagttgagcttggaaattggtgcgttgtacaacataagcattacttctccaagatgtgcctgtgtagaaatggtcatagattcaaaactgtagctactatgtggacaggggggcaacaaggaccccactttgtaaaacatgttttgggggaatgttttgtttttcattttcttattacctggcaaaataatccaggtggtgtgtgagtcaccagtagagattataaagtccaaggaagtagaatcagccttacaaacagtggacctcaacgaaggagatgctgcacctgaacccacagaagcgaaactcaaaagagaagaaagcaaaccaagaacctctctgatggcgtttctcagacaaatgagttcaacatgaattattctgatttgtctctgcaaagaaaaaagaaagaagggtagaagaaaaggagggaagtgagggagagagagaggacgagaggaaggaaggaaggaaagaaggaaggaaggaaggaaggaaacagttgttattaataataactgctgctacagaagtgacttcagatggatttaataagattctaagtgtaaacccaaacttcagtcacctttgcatacatacagctttacatgcctcaaaataagcaataaagaaaaatcactg

SEQ ID NO: 10934 - protein, 78 aa, Homo sapiens
MFWGNVLFFIFLLPGKIIQVVCESPVEIIKSKEVESALQTVDLNEGDAAPEPTEAKLKREESKPRTSLMAFLRQMSST

SEQ ID NO: 10935 - DNA, 578 bp, Homo sapiens
atcagatttcctgtgcgcatcgccgcgcgctcctcccacctcctaaatgcggagcggagcggggagcaaaaccatcctcggcctggacccagcgcctccggggaccggccgcgcgccccctgcgtccgcgggccgggatgcggctctgagccagcggcggcttccagcccgactgggcctgccggggctgccccgcgcacgagatcaagttaaagaataatccttggtaaatcttggctgcgggtgactgatggaagtttcagaggctggactggaagatgaaactggggcaagatgttacacagcatggcctcaggaacctgagctccagcaacctgcgggtcccaatggaggcgaagtcaaggagcgtctcagagagtggttgatgtgtgaagtctctgtctgcccatctgaataacaagagatggggcttgtgattttcctccacgcacccctacctgagggcctccaggaggaatgacatctcaaacagaaacctgcataacatcagcccaaaccaaggacccattttatcatcaaagaggtgtgccatgaatgcatgactgtgggatccactg

SEQ ID NO: 10936 - protein, 57 aa, Homo sapiens [sequence omitted]

SEQ ID NO: 10937 - DNA, 544 bp, Homo sapiens
atctttagtaaacgcgatgtattggcagctagatttggagtgaagtgaatgtgagtgaagctggaagcagattctgcaagaaacccaaatgttggaggggggttttccaagcgtcagagtcttaggtctctcaataccccctttgacactcgtggccacactcttccgccatgcccattacagtgactcactcggaactgcttgggaatcagtgacttggcagttttaggatgaagcttctaccaacctgagtgtctgagtaagatgagcagaattccctcacccaccaatgctatagatcaagttaaagaataatccttggtaaatcttggctgcgggtgactgatggaagtttcagaggctggactggaagatgaaactggggcaagatgttacacagcatggcctcaggaacctgagctccagcaacctgcgggtcccaatggaggcgaagtcaaggagcgtctcagagagtggttgatgtgtgaagtctctgtctgcccatctgaataacaagagatggggcttgtgattttcctccacg

SEQ ID NO: 10938 - protein, 46 aa, Homo sapiens
MLEGGFPSVRVLGLSIPPLTLVATLFRHAHYSDSLGTAWESVTWQF

SEQ ID NO: 10939 - DNA, 1597 bp, Homo sapiens
gagggggggagctgctgcagacccatgtggtgctctgcctcatgccctctcagcctaacctctaatttcagcagagatggggtgtgtttctgttccgtggttaagtcgctgcatgctcacagaggcttacttcaagcacgggctgcaaggttttactttcttcatcaggattcctctcatgccacgaatggggaaagttcacagttgttggagctgatattcctagagaaaaatgctgaaagctacatatggggcagtcctgctcctcagggcccacagaagctcagattcctcctgtctacttgctctgccaagtgttgtttttggtggcttaacgccacttccactctccagccagtagaaagtggatcaggcattatgcagagcacgaagaggagcacattgtagtctctgacttcagaagaagcagacagcaaaggtggtttccttcctggtggagattgccgattggactacagaatggcgagaatactgtgaaaggaggagcatagaaatccaagtgtgatcagtcagcaggtcttggccaggagcatacacagaataaacaaataaataagtaaagagaggaaggggaagtaatgttaagactgttcaagacttggaatacagctctcctaaaaagcagtcctttgaagtcttgggatactacagaaagatcccaacaaccactgagcctggtttcgatttttggaggaaacacaccaggtgaataaagcagtgtgacgtgagagaaaagagggcggcaaaggtgaatgggatcccagcctttcaaggacttgggcagagcaactggaggaggtgtgagtccagccaacagtgtggatcagtttcctaggctgccataacaaagcaccataacctggtggcttagaacaatggaaaggcatttgctcacggttccagaagctgtaggttagaaactaagtgtggcagggtcatggcccctctgaaacctaggagggaaggatgcttccctgcttcttcctgcttctgctatcccctgatgttcctgggttagtggcagcataattctggcctctgcctctgtcttaacgtggtgttttttcctgtgtctcttcatattgccttttgtctctgtgcctctacctctgagtccaaattgcccctttttataaggacaatcacattgtccttagtcacattggattggattagggcccactatacagaccttgttttaacttgattcttctatcaagaccctgagaatctccaaataaggccacattctgaggaactgtgggtttggacttcaacatgtcttttttgggggccacaactcaacccataccagcttgcttgatggatattcatagctgatgtcaaagtaaatttaattctcatcctcagaagcaagaaagattccacgactaaggccaacaataacatccagggagttcgtttcttgagcaacgaccagctctttgcatagcacgaattgccaaaaaaggccagcgtagtcatttctcggccatgcacacctgtgatgtggcaagccatgttgacgtgccaaaaatgagaattctccagtaaaaataaaatagagtaaattaga

SEQ ID NO: 10940 - protein, 127 aa, Homo sapiens
MWCSASCPLSLTSNFSRDGVCFCSVVKSLHAHRGLLQARAARFYFLHQDSSHATNGESSQLLELIFLEKNAESYIWGSPAPQGPQKLRFLLSTCSAKCCFWWLNATSTLQPVESGSGIMQSTKRSTL

SEQ ID NO: 10941 - DNA, 686 bp, Homo sapiens
gttccgtggttaagtcgctgcatgctcacagaggcttacttcaagcacgggctgcaaggttttactttcttcatcaggattcctctcatgccacgaatggggaaagttcacagttgttggagctgatattcctagagaaaaatgctgaaagctacatatggggcagtcctgctcctcagggcccacagaagctcagattcctcctgtctacttgctctgccaagtgttgtttttggtggcttaacgccacttccactctccagccagtagaaaggtgagaaaagcgaaagagaagaacagaattctcttcactgcaggatctccttacatcccactgatcagaatttccaccatgaccatgcctagattcaaggggtgaggtgaggggaggagctgggaaatgcagtctgcattctgtgcccagctaaaatgtagggatgcggttgccatagaatcggggaaagtggatatgggggcatggcagctggtgctcacggggcactctttgcctttgacagtggatcaggcattatgcagagcacgaagaggagcacattgtagtctctgacttcagaagaagcagacagcaaaggtggtttccttcctggtggagattgccgattggactacagaatggcgagaatactgtgaaaggaggagcatagaaatccaagtgtgatcagtca

SEQ ID NO: 10942 - protein, 42 aa, Homo sapiens
MLKATYGAVLLLRAHRSSDSSCLLALPSVVFGGLTPLPLSSQ

SEQ ID NO: 10943 - DNA, 4299 bp, Homo sapiens
ctcccagcggcggcggctgcagcgcggcggtccgagcgggtgcaccgcggcggaggaggcagcatcccgcggcgctgacggtcctggggagagcatggcgccgaggtgcccctggccatggccgcggcggcggcgcctcctggacgtgctcgcgcccctggtcctgctgctcggggtccgcgcggcctccgcggagccagagcgcatcagcgaggaggtggggctgctgcagctccttggggaccccccgccccagcaggtcacccagacggatgaccccgacgtcgggctggcctacgtctttgggccagatgccaacagtggccaagtggcccggtaccacttccccagcctcttcttccgtgacttctcactgctgttccacatccggccagccacagagggcccaggggtgctgttcgccatcacggactcggcgcaggccatggtcttgctgggcgtgaagctctctggggtgcaggacgggcaccaggacatctccctgctctacacagaaccaggtgcaggccagacccacacagccgccagcttccggctccccgccttcgtcggccagtggacacacttagccctcagtgtggcaggtggctttgtggccctctacgtggactgtgaggagttccagagaatgccgcttgctcggtcctcacggggcctggagctggagcctggcgccgggctcttcgtggctcaggcggggggagcggaccctgacaagttccagggggtgatcgctgagctgaaggtgcgcagggacccccaggtgagccccatgcactgcctggacgaggaaggcgatgactcagatggggcatccggagactctggcagcgggctcggggacgcccgggagcttctcagggaggagacgggcgcggccctaaaacccaggctccccgcgccaccccccgtcaccacgccacccttggctggaggcagcagcacggaagattccagaagtgaagaagtcgaggagcagaccacggtggcttcgttaggagctcagacacttcctggctcagattctgtctccacgtgggacgggagtgtccggacccctgggggccgcgtgaaagagggcggcctgaaggggcagaaaggggagccaggtgttccgggcccacctggccgggcaggccccccaggatccccatgcctacctggtcccccgggtctcccgtgcccagtgagtcccctgggtcctgcaggcccagcgttgcaaactgtccccggaccacaaggacccccagggcctccggggagggacggcacccctggaagggacggcgagccgggcgaccccggtgaagacggaaagccgggcgacaccgggccacaaggcttccccgggactccaggggacgtaggtcccaagggcgacaagggagaccctggggttggagagagagggcccccaggaccccaagggcctccagggcccccaggaccctccttcagacacgacaagctgaccttcattgacatggagggatctggcttcgggggcgatctggaggccctgcggggtcctcgaggcttccctggacctcccggaccccccggtgtcccaggcctgcccggcgagccaggccgctttggggtgaacagctccgacgtcccaggacccgccggccttcctggtgtgcctgggcgcgagggtccccccgggtttcctggcctcccgggacccccaggccctccgggaagagaggggcccccaggaaggactgggcagaaaggcagcctgggtgaagcaggcgccccaggacataaggggagcaagggagcccccggtcctgctggtgctcgtggggagagcggcctggcaggagcccccggacctgctggaccaccaggcccccctgggccccctgggcccccaggaccaggactccccgctggatttgatgacatggaaggctccggggggcccttctggtcaacagcccgaagcgctgatgggccacagggacctcccggcctgccgggacttaagggggatcctggcgtgcctgggctgccgggggcgaagggagaagttggagcagatggagtccccgggttccccggcctccctggcagagagggcattgctgggccccaggggccaaagggagacagaggcagccggggagaaaagggagatccagggaaggacggagtcgggcagccgggcctccctggcccccccggacccccgggacctgtggtctacgtgtcggagcaggacggatccgtcctgagcgtgccgggacctgagggccggccgggtttcgcaggctttcccggacctgcaggacccaagggcaacctgggctctaagggcgaacgaggctccccgggacccaagggtgagaagggtgaaccgggcagcatcttcagccccgacggcggtgccctgggccctgcccagaaaggagccaagggagagccgggcttccgaggacccccgggtccatacggacggccggggtacaagggagagattggctttcctggacggccgggtcgccccgggatgaacggattgaaaggagagaaaggggagccgggagatgccagccttggatttggcatgaggggaatgcccggccccccaggacctccagggcccccaggccctccagggactcctgtttacgacagcaatgtgtttgctgagtccagccgccccgggcctccaggattgccagggaatcagggccctccaggacccaagggcgccaaaggagaagtgggcccccccggaccaccagggcagtttccgtttgactttcttcagttggaggctgaaatgaagggggagaagggagaccgaggtgatgcaggacagaaaggcgaaaggggggagcccgggggcggcggtttcttcggctccagcctgcccggcccccccggccccccaggccccccaggcccacgtggctaccctgggattccaggtcccaagggagagagcatccggggccagcccggcccacctggacctcagggaccccccggcatcggctacgaggggcgccagggccctcccggccccccaggccccccagggcccccttcatttcctggccctcacaggcagactatcagcgttcccggccctccgggcccccctgggccccctgggccccctggaaccatgggcgcctcctcaggggtgaggctctgggctacacgccaggccatgctgggccaggtgcacgaggttcccgagggctggctcatcttcgtggccgagcaggaggagctctacgtccgcgtgcagaacgggttccggaaggtccagctggaggcccggacaccactcccacgagggacggacaatgaagtggccgccttgcagccccccgtggtgcagctgcacgacagcaacccctacccgcggcgggagcacccccaccccaccgcgcggccctggcgggcagatgacatcctggccagcccccctcgcctgcccgagccccagccctaccccggagccccgcaccacagctcctacgtgcacctgcggccggcgcgacccacaagcccacccgcccacagccaccgcgacttccagccggtgctccacctggttgcgctcaacagccccctgtcaggcggcatgcggggcatccgcggggccgacttccagtgcttccagcaggcgcgggccgtggggctggcgggcaccttccgcgccttcctgtcctcgcgcctgcaggacctgtacagcatcgtgcgccgtgccgaccgcgcagccgtgcccatcgtcaacctcaaggacgagctgctgtttcccagctgggaggctctgttctcaggctctgagggtccgctgaagcccggggcacgcatcttctcctttgacggcaaggacgtcctgaggcaccccacctggccccagaagagcgtgtggcatggctcggaccccaacgggcgcaggctgaccgagagctactgtgagacgtggcggacggaggctccctcggccacgggccaggcctcctcgctgctggggggcaggctcctggggcagagtgccgcgagctgccatcacgcctacatcgtgctctgcattgagaacagcttcatgactgcctccaagtagccaccgcctggatgcggatggccggagaggaccggcggctcggaggaagcccccaccgtgggcagggagcggccggccagcccctggccccaggacctggctgccatactttcctgtatagttcacgtttcatgtaatcctcaagaaataaaaggaagccaaagagtgtatttttttaaaagttt

SEQ ID NO: 10944 - protein, 1339 aa, Homo sapiens
MAPRCPWPWPRRRRLLDVLAPLVLLLGVRAASAEPERISEEVGLLQLLGDPPPQQVTQTDDPDVGLAYVFGPDANSGQVARYHFPSLFFRDFSLLFHIRPATEGPGVLFAITDSAQAMVLLGVKLSGVQDGHQDISLLYTEPGAGQTHTAASFRLPAFVGQWTHLALSVAGGFVALYVDCEEFQRMPLARSSRGLELEPGAGLFVAQAGGADPDKFQGVIAELKVRRDPQVSPMHCLDEEGDDSDGASGDSGSGLGDARELLREETGAALKPRLPAPPPVTTPPLAGGSSTEDSRSEEVEEQTTVASLGAQTLPGSDSVSTWDGSVRTPGGRVKEGGLKGQKGEPGVPGPPGRAGPPGSPCLPGPPGLPCPVSPLGPAGPALQTVPGPQGPPGPPGRDGTPGRDGEPGDPGEDGKPGDTGPQGFPGTPGDVGPKGDKGDPGVGERGPPGPQGPPGPPGPSFRHDKLTFIDMEGSGFGGDLEALRGPRGFPGPPGPPGVPGLPGEPGRFGVNSSDVPGPAGLPGVPGREGPPGFPGLPGPPGPPGREGPPGRTGQKGSLGEAGAPGHKGSKGAPGPAGARGESGLAGAPGPAGPPGPPGPPGPPGPGLPAGFDDMEGSGGPFWSTARSADGPQGPPGLPGLKGDPGVPGLPGAKGEVGADGVPGFPGLPGREGIAGPQGPKGDRGSRGEKGDPGKDGVGQPGLPGPPGPPGPVVYVSEQDGSVLSVPGPEGRPGFAGFPGPAGPKGNLGSKGERGSPGPKGEKGEPGSIFSPDGGALGPAQKGAKGEPGFRGPPGPYGRPGYKGEIGFPGRPGRPGMNGLKGEKGEPGDASLGFGMRGMPGPPGPPGPPGPPGTPVYDSNVFAESSRPGPPGLPGNQGPPGPKGAKGEVGPPGPPGQFPFDFLQLEAEMKGEKGDRGDAGQKGERGEPGGGGFFGSSLPGPPGPPGPPGPRGYPGIPGPKGESIRGQPGPPGPQGPPGIGYEGRQGPPGPPGPPGPPSFPGPHRQTISVPGPPGPPGPPGPPGTMGASSGVRLWATRQAMLGQVHEVPEGWLIFVAEQEELYVRVQNGFRKVQLEARTPLPRGTDNEVAALQPPVVQLHDSNPYPRREHPHPTARPWRADDILASPPRLPEPQPYPGAPHHSSYVHLRPARPTSPPAHSHRDFQPVLHLVALNSPLSGGMRGIRGADFQCFQQARAVGLAGTFRAFLSSRLQDLYSIVRRADRAAVPIVNLKDELLFPSWEALFSGSEGPLKPGARIFSFDGKDVLRHPTWPQKSVWHGSDPNGRRLTESYCETWRTEAPSATGQASSLLGGRLLGQSAASCHHAYIVLCIENSFMTASK

SEQ ID NO: 10945 - DNA, 5437 bp, Homo sapiens
ctcccagcggcggcggctgcagcgcggcggtccgagcgggtgcaccgcggcggaggaggcagcatcccgcggcgctgacggtcctggggagagcatggcgccgaggtgcccctggccatggccgcggcggcggcgcctcctggacgtgctcgcgcccctggtcctgctgctcggggtccgcgcggcctccgcggagccagagcgcatcagcgaggaggtggggctgctgcagctccttggggaccccccgccccagcaggtcacccagacggatgaccccgacgtcgggctggcctacgtctttgggccagatgccaacagtggccaagtggcccggtaccacttccccagcctcttcttccgtgacttctcactgctgttccacatccggccagccacagagggcccaggggtgctgttcgccatcacggactcggcgcaggccatggtcttgctgggcgtgaagctctctggggtgcaggacgggcaccaggacatctccctgctctacacagaaccaggtgcaggccagacccacacagccgccagcttccggctccccgccttcgtcggccagtggacacacttagccctcagtgtggcaggtggctttgtggccctctacgtggactgtgaggagttccagagaatgccgcttgctcggtcctcacggggcctggagctggagcctggcgccgggctcttcgtggctcaggcggggggagcggaccctgacaagttccagggggtgatcgctgagctgaaggtgcgcagggacccccaggtgagccccatgcactgcctggacgaggaaggcgatgactcagatggggcatccggagactctggcagcgggctcggggacgcccgggagcttctcagggaggagacgggcgcggccctaaaacccaggctccccgcgccaccccccgtcaccacgccacccttggctggaggcagcagcacggaagattccagaagtgaagaagtcgaggagcagaccacggtggcttcgttaggagctcagacacttcctggctcagattctgtctccacgtgggacgggagtgtccggacccctgggggccgcgtgaaagagggcggcctgaaggggcagaaaggggagccaggtgttccgggcccacctggccgggcaggccccccaggatccccatgcctacctggtcccccgggtctcccgtgcccagtgagtcccctgggtcctgcaggcccagcgttgcaaactgtccccggaccacaaggacccccagggcctccggggagggacggcacccctggaagggacggcgagccgggcgaccccggtgaagacggaaagccgggcgacaccgggccacaaggcttccccgggactccaggggacgtaggtcccaagggcgacaagggagaccctggggttggagagagagggcccccaggaccccaagggcctccagggcccccaggaccctccttcagacacgacaagctgaccttcattgacatggagggatctggcttcgggggcgatctggaggccctgcggggtcctcgaggcttccctggacctcccggaccccccggtgtcccaggcctgcccggcgagccaggccgctttggggtgaacagctccgacgtcccaggacccgccggccttcctggtgtgcctgggcgcgagggtccccccgggtttcctggcctcccgggacccccaggccctccgggaagagaggggcccccaggaaggactgggcagaaaggcagcctgggtgaagcaggcgccccaggacataaggggagcaagggagcccccggtcctgctggtgctcgtggggagagcggcctggcaggagcccccggacctgctggaccaccaggcccccctgggccccctgggcccccaggaccaggactccccgctggatttgatgacatggaaggctccggggggcccttctggtcaacagcccgaagcgctgatgggccacagggacctcccggcctgccgggacttaagggggatcctggcgtgcctgggctgccgggggcgaagggagaagttggagcagatggagtccccgggttccccggcctccctggcagagagggcattgctgggccccaggggccaaagggagacagaggcagccggggagaaaagggagatccagggaaggacggagtcgggcagccgggcctccctggcccccccggacccccgggacctgtggtctacgtgtcggagcaggacggatccgtcctgagcgtgccgggacctgagggccggccgggtttcgcaggctttcccggacctgcaggacccaagggcaacctgggctctaagggcgaacgaggctccccgggacccaagggtgagaagggtgaaccgggcagcatcttcagccccgacggcggtgccctgggccctgcccagaaaggagccaagggagagccgggcttccgaggacccccgggtccatacggacggccggggtacaagggagagattggctttcctggacggccgggtcgccccgggatgaacggattgaaaggagagaaaggggagccgggagatgccagccttggatttggcatgaggggaatgcccggccccccaggacctccagggcccccaggccctccagggactcctgtttacgacagcaatgtgtttgctgagtccagccgccccgggcctccaggattgccagggaatcagggccctccaggacccaagggcgccaaaggagaagtgggcccccccggaccaccagggcagtttccgtttgactttcttcagttggaggctgaaatgaagggggagaagggagaccgaggtgatgcaggacagaaaggcgaaaggggggagcccgggggcggcggtttcttcggctccagcctgcccggcccccccggccccccaggccccccaggcccacgtggctaccctgggattccaggtcccaagggagagagcatccggggccagcccggcccacctggacctcagggaccccccggcatcggctacgaggggcgccagggccctcccggccccccaggccccccagggcccccttcatttcctggccctcacaggcagactatcagcgttcccggccctccgggcccccctgggccccctgggccccctggaaccatgggcgcctcctcaggggtgaggctctgggctacacgccaggccatgctgggccaggtgcacgaggttcccgagggctggctcatcttcgtggccgagcaggaggagctctacgtccgcgtgcagaacgggttccggaaggtccagctggaggcccggacaccactcccacgagggacggacaatgaagtggccgccttgcagccccccgtggtgcagctgcacgacagcaacccctacccgcggcgggagcacccccaccccaccgcgcggccctggcgggcagatgacatcctggccagcccccctcgcctgcccgagccccagccctaccccggagccccgcaccacagctcctacgtgcacctgcggccggcgcgacccacaagcccacccgcccacagccaccgcgacttccagccggtgctccacctggttgcgctcaacagccccctgtcaggcggcatgcggggcatccgcggggccgacttccagtgcttccagcaggcgcgggccgtggggctggcgggcaccttccgcgccttcctgtcctcgcgcctgcaggacctgtacagcatcgtgcgccgtgccgaccgcgcagccgtgcccatcgtcaacctcaaggacgagctgctgtttcccagctgggaggctctgttctcaggctctgagggtccgctgaagcccggggcacgcatcttctcctttgacggcaaggacgtcctgaggcaccccacctggccccagaagagcgtgtggcatggctcggaccccaacgggcgcaggctgaccgagagctactgtgagacgtggcggacggaggctccctcggccacgggccaggcctcctcgctgctggggggcaggctcctggggcagagtgccgcgagctgccatcacgcctacatcgtgctctgcattgagaacagcttcatgactgcctccaagtagccaccgcctggatgcggatggccggagaggaccggcggctcggaggaagcccccaccgtgggcagggagcggccggccagcccctggccccaggacctggctgccatactttcctgtatagttcacgtttcatgtaatcctcaagaaataaaaggaagccaaagagtgtatttttttaaaagtttaaaacagaagcctgatgctgacattcacctgccccaactctcccctgacctgtgagcccagctgggtcaggcagggtgcagtatcatgccctgtgcaacctcttggcctgatcagaccacggctcgatttctccaggatttcctgctttgggaagccgtgctcgccccagcaggtgctgacttcatctcccacctagcagcaccgttctgtgcacaaaacccagacctgttagcagacaggccccgtgaggcaatgggagctgaggccacactcagcacaaggccatctgggctcctccagggtgtgtgctcgccctgcggtagatgggagggaggctcaggtccctggggctagggggagccccttctgctcagctctgggccattctccacagcaaccccaggctgaagcaggttcccaagctcagaggcgcactgtgacccccagctccggcctgtcctccaacaccaagcacagcagcctggggctggcctcccaaatgagccatgagatgatacatccaaagcagacagctccaccctggccgagtccaagctgggagattcaagggacccatgagttggggtctggcagcctcccatccagggcccccatctcatgcccctggctgggacgtggctcagccagcacttgtccagctgagcgccaggatggaacacggccacatcaaagaggctgaggctggcacaggacatgcggtagccagcacacagggcagtgagggagggctgtcatctgtgcactgcccatggacaggctggctccagatgcagggcagtcattggctgtctcctaggaaacccatatccttaccctccttgggactgaaggggaaccccggggtgcccacaggccgccctgcgggtgaacaaagcagccacgaggtgcaacaaggtcctctgtcagtcacagccacccctgagatccggcaacatcaacccgagtcattcgttctgtggagggacaagtggactcagggcagcgccaggctgaccacagcacagccaacacgcacctgcctcaggactgcgacgaaaccggtggggctggttctgtaattgtgtgtgatgtgaagccaattcagacaggcaaataaaagtgaccttttacactgac

SEQ ID NO: 10946 - protein, 1339 aa, Homo sapiens; identical to SEQ ID NO: 10944

SEQ ID NO: 10947 - DNA, 1406 bp, Homo sapiens
agcggcggcggctgcagcgcggcggtccgagcgggtgcaccgcggcggaggaggcagcatcccgcggcgctgacggtcctggggagagcatggcgccgaggtgcccctggccatggccgcggcggcggcgcctcctggacgtgctcgcgcccctggtcctgctgctcggggtccgcgcggcctccgcggagccagagcgcatcagcgaggaggtggggctgctgcagctccttggggaccccccgccccagcaggtcacccagacggatgaccccgacgtcgggctggcctacgctctgggctacacgccaggccatgctgggccaggtgcacgaggttcccgagggctggctcatcttcgtggccgagcaggaggagctctacgtccgcgtgcagaacgggttccggaaggtccagctggaggcccggacaccactcccacgagggacggacaatgaagtggccgccttgcagccccccgtggtgcagctgcacgacagcaacccctacccgcggcgggagcacccccaccccaccgcgcggccctggcgggcagatgacatcctggccagcccccctcgcctgcccgagccccagccctaccccggagccccgcaccacagctcctacgtgcacctgcggccggcgcgacccacaagcccacccgcccacagccaccgcgacttccagccggtgctccacctggttgcgctcaacagccccctgtcaggcggcatgcggggcatccgcggggccgacttccagtgcttccagcaggcgcgggccgtggggctggcgggcaccttccgcgccttcctgtcctcgcgcctgcaggacctgtacagcatcgtgcgccgtgccgaccgcgcagccgtgcccatcgtcaacctcaaggacgagctgctgtttcccagctgggaggctctgttctcaggctctgagggtccgctgaagcccggggcacgcatcttctcctttgacggcaaggacgtcctgaggcaccccacctggccccagaagagcgtgtggcatggctcggaccccaacgggcgcaggctgaccgagagctactgtgagacgtggcggacggaggctccctcggccacgggccaggcctcctcgctgctggggggcaggctcctggggcagagtgccgcgagctgccatcacgcctacatcgtgctctgcattgagaacagcttcatgactgcctccaagtagccaccgcctggatgcggatggccggagaggaccggcggctcggaggaagcccccaccgtgggcagggagcggccggccagcccctggccccaggacctggctgccatactttcctgtatagttcacgtttcatgtaatcctcaagaaataaaaggaagccaaagagtgtatttttttaaaagttt

SEQ ID NO: 10948 - protein, 317 aa, Homo sapiens
MTPTSGWPTLWATRQAMLGQVHEVPEGWLIFVAEQEELYVRVQNGFRKVQLEARTPLPRGTDNEVAALQPPVVQLHDSNPYPRREHPHPTARPWRADDILASPPRLPEPQPYPGAPHHSSYVHLRPARPTSPPAHSHRDFQPVLHLVALNSPLSGGMRGIRGADFQCFQQARAVGLAGTFRAFLSSRLQDLYSIVRRADRAAVPIVNLKDELLFPSWEALFSGSEGPLKPGARIFSFDGKDVLRHPTWPQKSVWHGSDPNGRRLTESYCETWRTEAPSATGQASSLLGGRLLGQSAASCHHAYIVLCIENSFMTASK

SEQ ID NO: 10949 - DNA, 2544 bp, Homo sapiens
agcggcggcggctgcagcgcggcggtccgagcgggtgcaccgcggcggaggaggcagcatcccgcggcgctgacggtcctggggagagcatggcgccgaggtgcccctggccatggccgcggcggcggcgcctcctggacgtgctcgcgcccctggtcctgctgctcggggtccgcgcggcctccgcggagccagagcgcatcagcgaggaggtggggctgctgcagctccttggggaccccccgccccagcaggtcacccagacggatgaccccgacgtcgggctggcctacgctctgggctacacgccaggccatgctgggccaggtgcacgaggttcccgagggctggctcatcttcgtggccgagcaggaggagctctacgtccgcgtgcagaacgggttccggaaggtccagctggaggcccggacaccactcccacgagggacggacaatgaagtggccgccttgcagccccccgtggtgcagctgcacgacagcaacccctacccgcggcgggagcacccccaccccaccgcgcggccctggcgggcagatgacatcctggccagcccccctcgcctgcccgagccccagccctaccccggagccccgcaccacagctcctacgtgcacctgcggccggcgcgacccacaagcccacccgcccacagccaccgcgacttccagccggtgctccacctggttgcgctcaacagccccctgtcaggcggcatgcggggcatccgcggggccgacttccagtgcttccagcaggcgcgggccgtggggctggcgggcaccttccgcgccttcctgtcctcgcgcctgcaggacctgtacagcatcgtgcgccgtgccgaccgcgcagccgtgcccatcgtcaacctcaaggacgagctgctgtttcccagctgggaggctctgttctcaggctctgagggtccgctgaagcccggggcacgcatcttctcctttgacggcaaggacgtcctgaggcaccccacctggccccagaagagcgtgtggcatggctcggaccccaacgggcgcaggctgaccgagagctactgtgagacgtggcggacggaggctccctcggccacgggccaggcctcctcgctgctggggggcaggctcctggggcagagtgccgcgagctgccatcacgcctacatcgtgctctgcattgagaacagcttcatgactgcctccaagtagccaccgcctggatgcggatggccggagaggaccggcggctcggaggaagcccccaccgtgggcagggagcggccggccagcccctggccccaggacctggctgccatactttcctgtatagttcacgtttcatgtaatcctcaagaaataaaaggaagccaaagagtgtatttttttaaaagtttaaaacagaagcctgatgctgacattcacctgccccaactctcccctgacctgtgagcccagctgggtcaggcagggtgcagtatcatgccctgtgcaacctcttggcctgatcagaccacggctcgatttctccaggatttcctgctttgggaagccgtgctcgccccagcaggtgctgacttcatctcccacctagcagcaccgttctgtgcacaaaacccagacctgttagcagacaggccccgtgaggcaatgggagctgaggccacactcagcacaaggccatctgggctcctccagggtgtgtgctcgccctgcggtagatgggagggaggctcaggtccctggggctagggggagccccttctgctcagctctgggccattctccacagcaaccccaggctgaagcaggttcccaagctcagaggcgcactgtgacccccagctccggcctgtcctccaacaccaagcacagcagcctggggctggcctcccaaatgagccatgagatgatacatccaaagcagacagctccaccctggccgagtccaagctgggagattcaagggacccatgagttggggtctggcagcctcccatccagggcccccatctcatgcccctggctgggacgtggctcagccagcacttgtccagctgagcgccaggatggaacacggccacatcaaagaggctgaggctggcacaggacatgcggtagccagcacacagggcagtgagggagggctgtcatctgtgcactgcccatggacaggctggctccagatgcagggcagtcattggctgtctcctaggaaacccatatccttaccctccttgggactgaaggggaaccccggggtgcccacaggccgccctgcgggtgaacaaagcagccacgaggtgcaacaaggtcctctgtcagtcacagccacccctgagatccggcaacatcaacccgagtcattcgttctgtggagggacaagtggactcagggcagcgccaggctgaccacagcacagccaacacgcacctgcctcaggactgcgacgaaaccggtggggctggttctgtaattgtgtgtgatgtgaagccaattcagacaggcaaataaaagtgaccttttacactgac

SEQ ID NO: 10950 - protein, 317 aa, Homo sapiens; identical to SEQ ID NO: 10948

SEQ ID NO: 10951 - DNA, 4917 bp, Homo sapiens
agcggcggcggctgcagcgcggcggtccgagcgggtgcaccgcggcggaggaggcagcatcccgcggcgctgacggtcctggggagagcatggcgccgaggtgcccctggccatggccgcggcggcggcgcctcctggacgtgctcgcgcccctggtcctgctgctcggggtccgcgcggcctccgcggagccagagcgcatcagcgaggaggtggggctgctgcagctccttggggaccccccgccccagcaggtcacccagacggatgaccccgacgtcgggctggcctacgctctgggctacacgccaggccatgctgggccaggtgcacgaggttcccgagggctggctcatcttcgtggccgagcaggaggagctctacgtccgcgtgcagaacgggttccggaaggtccagctggaggcccggacaccactcccacgagggacggacaatgaagtggccgccttgcagccccccgtggtgcagctgcacgacagcaacccctacccgcggcgggagcacccccaccccaccgcgcggccctggcgggcagatgacatcctggccagcccccctcgcctgcccgagccccagccctaccccggagccccgcaccacagctcctacgtgcacctgcggccggcgcgacccacaagcccacccgcccacagccaccgcgacttccagccggtgctccacctggttgcgctcaacagccccctgtcaggcggcatgcggggcatccgcggggccgacttccagtgcttccagcaggcgcgggccgtggggctggcgggcaccttccgcgccttcctgtcctcgcgcctgcaggacctgtacagcatcgtgcgccgtgccgaccgcgcagccgtgcccatcgtcaacctcaaggacgagctgctgtttcccagctgggaggctctgttctcaggctctgagggtccgctgaagcccggggcacgcatcttctcctttgacggcaaggacgtcctgaggcaccccacctggccccagaagagcgtgtggcatggctcggaccccaacgggcgcaggctgaccgagagctactgtgagacgtggcggacggaggctccctcggccacgggccaggcctcctcgctgctggggggcaggctcctggggcagagtgccgcgagctgccatcacgcctacatcgtgctctgcattgagaacagcttcatgactgcctccaagtagccaccgcctggatgcggatggccggagaggaccggcggctcggaggaagcccccaccgtgggcagggagcggccggccagcccctggccccaggacctggctgccatactttcctgtatagttcacgtttcatgtaatcctcaagaaataaaaggaagccaaagagtgtatttttttaaaagtttaaaacagaagcctgatgctgacattcacctgccccaactctcccctgacctgtgagcccagctgggtcaggcagggtgcagtatcatgccctgtgcaacctcttggcctgatcagaccacggctcgatttctccaggatttcctgctttgggaagccgtgctcgccccagcaggtgctgacttcatctcccacctagcagcaccgttctgtgcacaaaacccagacctgttagcagacaggccccgtgaggcaatgggagctgaggccacactcagcacaaggccatctgggctcctccagggtgtgtgctcgccctgcggtagatgggagggaggctcaggtccctggggctagggggagccccttctgctcagctctgggccattctccacagcaaccccaggctgaagcaggttcccaagctcagaggcgcactgtgacccccagctccggcctgtcctccaacaccaagcacagcagcctggggctggcctcccaaatgagccatgagatgatacatccaaagcagacagctccaccctggccgagtccaagctgggagattcaagggacccatgagttggggtctggcagcctcccatccagggcccccatctcatgcccctggctgggacgtggctcagccagcacttgtccagctgagcgccaggatggaacacggccacatcaaagaggctgaggctggcacaggacatgcggtagccagcacacagggcagtgagggagggctgtcatctgtgcactgcccatggacaggctggctccagatgcagggcagtcattggctgtctcctaggaaacccatatccttaccctccttgggactgaaggggaaccccggggtgcccacaggccgccctgcgggtgaacaaagcagccacgaggtgcaacaaggtcctctgtcagtcacagccacccctgagatccggcaacatcaacccgagtcattcgttctgtggagggacaagtggactcagggcagcgccaggctgaccacagcacagccaacacgcacctgcctcaggactgcgacgaaaccggtggggctggttctgtaattgtgtgtgatgtgaagccaattcagacaggcaaataaaagtgaccttttacactgactcttggtttgcaagcagccttcactgtcacaggaaggacacaattctccaaaaggagttctcaggagtcttttatccctggactgccccactggcagatcccgagtgtgcacaggcacgcacggttacatggggtatgcatgcatggccatacacaggcgtgcagttgtacacaggtgtgcaggagcatccatagtgtgcacaggtacacaggcatgcacgggtgtgtggacacacaccaacactcttaggtctctcctcacagcaggacctgacttgctcccagcaacactacatcctgacagccatccctgtcctggtggacgggtgagtgcaggactcagaggcaggcaggcagtgggtgcagtgagcaggctgcggagggagcaggccctcaggttggggaggcgctgggaggaggattctgatggcggtgtgggcctccccagtgacgctctagcccatggcacaggcccagcccacctccacccatcacatcctgctagatctacgagcccaggaaatggctggtgcagacccccccccaagcagggtccccagggtggccatgacagagcccctggatgcacctgggaccatggccctgtctgactggcaccatccactgactcgggccatcttccacgtgcagcctctgcctcaacccagggtaccccaagatgcctgctcccctgagccacctcgggagacccctgggtccagcagctccagcagcccctccccagccagagattctctccccagctctccgtgctgagcagccagccattcacctggggccgctgagatgtggcagaggccccacaggatagggccgttgactagggttgtgggggtgctcagctcatgggcaccaaggccctgcgtgggctggaggcgggagaaggctgggacgcctctcctggcctcctcactgactgctgaccctcaacccccaggccaggccggccctgaatcagaagccctgcgcacactcacttaagtgtgtttaatgtatgtgggaagagtattcacatcacatcagatggtcccgcacctgtgggcaaggcactagcgctccttagaccctgaggccgctgggacgtacttccccagcgcccaccacaaaggcagcccccccaaggctgcccagcccaggcaagcctggcacataccaaggccagcacgtccgcggtgaccgggaccagtcccctccgggctggcacaagtgtgggagcagctgaggacccgcaggtcaggatggacacacttcagaaggacagacaggaccatggagggctgcccttagggtgggagagaggaaccagctccgaggaccagagccgctgctcccctctgatgacaatgtgtctgccgccaacctgagatggcttttccacagagacagagaagccacatgcagttcttcattctacgtcagttaaaaaaaaaaaaagcatctttcaaaaaagcaagagcaccaaggatgaccagcaatgtcacagctcagctacacctgagggtcccggctcccaccctgccctagagggctcacaactcctgtggggccagtgtcccctgagctggtatccaagaggccacttcactagccctggggggcagaaaggatttgtctcaagccccccaaggggcatgagccagtgaggcctggtggacgcagaagcccaccacccacctcttccagcaacaaagcccgcggggcacagtgcagggacagcatggccaggcagctgccctgagtgtcgccagcacgctgtggccaccgccagagtgcggcacagggcagggggaatcctagggggcctgctagcaggataagcggaggcccccattgctaaggcaggcggccctcgaggcaggggtcgtggggatgcactgagggccgcctgcaaagttaccacaggggcgcccgagagtcactggttcacattctgaacaccgtcgcttggaagacactgcaaacccagcttgctgacaccaggaggatggacagccagctggggacaagtctcatctgcagcctcagggcctgaggcttgggcggagcacagagtgcagggggaaggggttgtcactgggctcaggaattcagctgcctgcggggccggggcctgggccaggtatgggtcgctctgtctctgctccagggaggctggccccacagcccccaggctgtcttctggggaaagcggcgggctctgggctggctgcaggcctccgaggcccttgtcctgcacgctcagtgcctgtgctgccttctcctccgcggcactcctcaggccctgggccgggggctgccgcgggtggtggccccgctggcagtgccgcaggccatccagcatggcccccaaga

SEQ ID NO: 10952 - protein, 317 aa, Homo sapiens; identical to SEQ ID NO: 10948

SEQ ID NO: 10953 - DNA, 421 bp, Homo sapiens
gcgggtgcaccgcggcggaggaggcagcatcccgcggcgctgacggtcctggggagagcatggcgccgaggtgcccctggccatggccgcggcggcggcgcctcctggacgtgctcgcgcccctggtcctgctgctcggggtccgcgcggcctccgcggagccagccttcagggtcgaggtgtgggagacccgcggagaggcagcccagagccacccgccacgggctgaggcctagggtggccagaagcaggagggacgcctctgacgattgaacagcccggagcctcaaagctacggttggggccttcagcccggaaatgagcccccctctttgccccctgatgaaccagtttcccctgttcacgtgtggatgtttgtacctttttaaaaaaagaaaataaaagaccacactatttagga

SEQ ID NO: 10954 - protein, 58 aa, Homo sapiens
MAPRCPWPWPRRRRLLDVLAPLVLLLGVRAASAEPAFRVEVWETRGEAAQSHPPRAEA

SEQ ID NO: 10955 - DNA, 3425 bp, Homo sapiens
agaaacctcctgcgaatggctacagaggaaattttcaggtgcgagagatctgaagaaagttctggaacccgcgcctggaccggtttggaccctcagtggaaacacatcaaagagaaggaaaaccagctggggaaggatcctggcagcggtggctcaggtctgggagaaagaggcgcgggcgaggcagtgcctgagcaatggaaaccgacgggcaggaggcgggaaggggctgcgccacgggcctcccagggtccccacgccactgcacacctaggactgagggagggtcagtgggggccaagggctgccccggaagggagccggttttcaggagcttccaagctgaagggcagaagccaccaggacctggcccagcgctctggtccagggtcaggtcacacctctgaccagggattggaggctgcaaattggaggcaccactggccgagtgctcgcgagttctccactggtcaggtgggccgcaggggccttgggggagcgccttggcactgtgggaggtgaccacgcaggctcaggcacggctgccctgggggtcatcctctgtggggcaccttggggcaggtgtctgtatcccgggaaccctcgcccagagacccacggctaacccacagcagagctgcgctccaggcgtgtttacctgcgccacacacctcctcacctggctctccgccctgcagagagggcctcccactgctccccagcagagccctgagcctgcctgtgccctgggcctgccaacaccaccagggcccaccacagaggcacaggaagcctgggtttgctcctgaattgccgtgactgccacctcctccacctgagaaggtgtccctgtgtcactgtggatggcggaccgggcactgcgggaggtggggtggcctgccagggtcccgacatgaggcctccttaagccctaccctccccccagcaccagtgcccgggaccctctgcagggactgtttccaccagggccccgcagcactgcccagcaccctggcccggctccgtctgcaggacctgctggcaggacaggcccctgtctgtgcatcagaattcactgggaggcagctgctcctacagcctcagattccaaatccaaatgcccaacaggagggccctgggcgagcagctgagtgcgtcaggcctctgcccccaggacactgcagaaccctgctccaagagggtcttaaactggccagtaagggctccaactcagaaccacggagtctgcaggacggaactgcctccacccgggtgctgggcggaggccccgtttttcaccaaccgacggctgggagagcccgtgccacccactgtgccctgagacccgcacaggacggcgactcacagatgccttttgctgccctgcccgggtcctggcacggcgcgaggtgcgtcaggccaggcagccacgcaaaggccccggctcctggcttctgccatctattctgtcctgcaactctatcctggagcctcccatcccttcaaaagctgcaggaagaggcctgcaggcaagagaagaggactgcaggagtgagcaatttaagaaatggaaggccgaggttttccaatctaattaacagcatgacaagccaggatgggctgctgacccgcgtggagccttgcacagccagaaacgcggtgtcctgctccgctcctgagacgccagggctgtcactgcaacacagcccccaacacttccacacgggcggactctggctctccaggcaccgcagtgccctctccttcccttcccagctctcctgaggcctgtggttctgggagtctctgccccgtgcaagcgtgaccgtggccctcctcccatgtccagccgcaccaggccctgggatcccagatctggcttcacctttgcaaggggctcaaagcaagcacctatgggggtgggggcggcaaagccgtctggccaaggtcccttctctagagtgcctgtctgtccgtctgtccttgaggagcctgaggagtgcagggcaggacaggcaggcaccagctgacccggtaccgggcagggaccagtgcaggacctcgaggcagggctgggtggggtgggggtggccagagtctcctggctcggagcagacacgggtgagtggcacagactgtcctcacaccctcctgggacagaggtaggaatccgtgaccaggacagacacaggcaggactgggagaggcagagcaggtgcctgagcttggccacgcacagcttccaatgaggttgggccatccacagctccccaaggttccccgccactgttcaccccaccccagcacagccgagagctgtggtttctcctcccatggagtcctgcatggctgcccactgcaggcccagcccaagggcaccgccttctccaggctgccttccctgcacatgccacacctccagccccagaaggttctgaggaggggaggagctggggcccccactcgccctcctgttgccaggatacaggcccaggaaaaaatgccacagtgctggattaatgtctagacaacgtgacctttcccctggttctctagatataattgggacccaaattgtccggtgtcatgagctgacagcagggatgaaggaggggtctgttctcggtgccccgaggggactccgggagagggagagggcagcccactacctgcgtgggggctgcagggggacgagccagggtcgcccacaaaggcgctttctgtggaggggacgtcacctcttccatcagcgatgacgcagctctgagatcacagtgtcctcgcagtggctcccgttaactccctgctgcccgtcctgccaggctggtgccacgagaccctcggggctgggccgtgggacaggtgcctgcccagccctgcaaacacatccagcaggtgtcgagggctgccaagcacagacttctgctgccagccatgcacagtgccagctgcgacagcaacgcctctgccaggagactcggaggagaccggccctgacgctcctgtcggggggagctgctgcacactcaggcaggatgcaggggtcctgagggggaccctcggctcacccacggctcccgtggccggtctggtcctggtatttatctcaacttcattgttgtccagaagctgctttttattatttgtgaccatgaaaggatggaaacaaattcctgttttgagtcaaagctacctgcgtccaccgggccacagagcggggacacggccgtaatgtggagtcagtaagccaaggttgtgagaagattctcaggaggggggtccagggagggagaactgagggctggggttccgggggacattttactttttattccaggcagcgctgtactggctggggcctcaaatgctgaataatgctcctgttggacttcagtaattttaaaaaataaaactgtttaaaaatc

SEQ ID NO: 10956 - protein, 138 aa, Homo sapiens; identical to SEQ ID NO: 1694

SEQ ID NO: 10957 - DNA, 2341 bp, Homo sapiens
actgactggcccccgagcccggggcatctgagaaacctcctgcgaatggctacagaggaaattttcaggtgcgagagatctgaagaaagttctggaacccgcgcctggaccggtttggaccctcagtggaaacacatcaaagagaaggaaaaccagctggggaaggatcctggcagcggtggctcagggtgctgggcggaggccccgtttttcaccaaccgacggctgggagagcccgtgccacccactgtgccctgagacccgcacaggacggcgactcacagatgccttttgctgccctgcccgggtcctggcacggcgcgaggtgcgtcaggccaggcagccacgcaaaggccccggctcctggcttctgccatctattctgtcctgcaactctatcctggagcctcccatcccttcaaaagctgcaggaagaggcctgcaggcaagagaagaggactgcaggagtgagcaatttaagaaatggaaggccgaggttttccaatctaattaacagcatgacaagccaggatgggctgctgacccgcgtggagccttgcacagccagaaacgcggtgtcctgctccgctcctgagacgccagggctgtcactgcaacacagcccccaacacttccacacgggcggactctggctctccaggcaccgcagtgccctctccttcccttcccagctctcctgaggcctgtggttctgggagtctctgccccgtgcaagcgtgaccgtggccctcctcccatgtccagccgcaccaggccctgggatcccagatctggcttcacctttgcaaggggctcaaagcaagcacctatgggggtgggggcggcaaagccgtctggccaaggtcccttctctagagtgcctgtctgtccgtctgtccttgaggagcctgaggagtgcagggcaggacaggcaggcaccagctgacccggtaccgggcagggaccagtgcaggacctcgaggcagggctgggtggggtgggggtggccagagtctcctggctcggagcagacacgggtgagtggcacagactgtcctcacaccctcctgggacagaggtaggaatccgtgaccaggacagacacaggcaggactgggagaggcagagcaggtgcctgagcttggccacgcacagcttccaatgaggttgggccatccacagctccccaaggttccccgccactgttcaccccaccccagcacagccgagagctgtggtttctcctcccatggagtcctgcatggctgcccactgcaggcccagcccaagggcaccgccttctccaggctgccttccctgcacatgccacacctccagccccagaaggttctgaggaggggaggagctggggcccccactcgccctcctgttgccaggatacaggcccaggaaaaaatgccacagtgctggattaatgtctagacaacgtgacctttcccctggttctctagatataattgggacccaaattgtccggtgtcatgagctgacagcagggatgaaggaggggtctgttctcggtgccccgaggggactccgggagagggagagggcagcccactacctgcgtgggggctgcagggggacgagccagggtcgcccacaaaggcgctttctgtggaggggacgtcacctcttccatcagcgatgacgcagctctgagatcacagtgtcctcgcagtggctcccgttaactccctgctgcccgtcctgccaggctggtgccacgagaccctcggggctgggccgtgggacaggtgcctgcccagccctgcaaacacatccagcaggtgtcgagggctgccaagcacagacttctgctgccagccatgcacagtgccagctgcgacagcaacgcctctgccaggagactcggaggagaccggccctgacgctcctgtcggggggagctgctgcacactcaggcaggatgcaggggtcctgagggggaccctcggctcacccacggctcccgtggccggtctggtcctggtatttatctcaacttcattgttgtccagaagctgctttttattatttgtgaccatgaaaggatggaaacaaattcctgttttgagtcaaagctacctgcgtccaccgggccacagagcggggacacggccgtaatgtggagtcagtaagccaaggttgtgagaagattctcaggaggggggtccagggagggagaactgagggctggggttccgggggacattttactttttattccaggcagcgctgtactggctggggcctcaaatgctgaataatgctcctgttggacttcagtaattttaaaaaataaaactgtttaaaaatc

SEQ ID NO: 10958 - protein, 138 aa, Homo sapiens; identical to SEQ ID NO: 1694

SEQ ID NO: 10959 - DNA, 1377 bp, Homo sapiens
gcagagcctgggcatgcggcgagccacccctgccacccctttcccgctggaaaccacagatggcaatgacagcagtagtcccctggcagccacacacccctctccaagaaccccagcgtgccacctgccagagcctgcagctcccacacccctctcatgcctccagcacagccctgccaccacttgcagaggaagctgagaccagagcactgaagtaacctgcccaagactgcacagcttgctggcagaggagcagagcctgcggcacggcctctgtgttacactgtgggccctgaggatgaggactggcctggagtccctttgggtctgcagagcaatgcctggcacagagcaggccctgactggggctgcagagtcactaagtccctgcatgggggaccaactgatgcaggctctgaggtcccaggattctgtggagattcacaggggacctaggaccctcggagctgccctctgaattcaagcagtggtgcctcctgtgcttgtcaggcaggatgatctgtggggcctgtgggctctgacctcactctgcagcagcaaagcccagaggcctcactttttcatgaaccagcacaggctctcctgagagccctggagggaaggctccggctatactgcctcctggtgtgaggaggcttctctcttgtctgtcccactagggcggggctgacgttctacccttgccggtgggctctggtctgcttcccctcatcatgcccttctcaacattctcattttcagactgaagttgggtgattgctccttttctcagagtgcttgggtgcagcaggctgcggaggggcactgaggcagcccagcctcaaccagggttcccaggacctgaggccccaggctggaccccagcaggctgcaggctgccctgcggacaccacacctcaacaccacaaagggccctgctgaggttggcagtcagtgctcagagcacctccaggcacggttcctaacgagcaagctgatgccaaggtcacatgaccatgagtttttggctgcgttgggtcctgtttatggagagatggtgggaggggagcagcatgggtgggtggtggttcacgcttaggggactaactgggagctacagtaagacacatgcgtaccattaagaagagactttctctgtcggaactgtgggtgcttgtaggcccggcctggaggaggaggaagccgtgctgtccttttctgcccaagtgttctcaggctgaggcaggccttaagtggctccgtgtggaaaagctctctgtggctttctcacactctggacaccacgtggaccactcagggcagcaggggcgttactctcgggcttgcagcctttcatggacatttgagaagatgcct

SEQ ID NO: 10960 - protein, 61 aa, Homo sapiens
MRRATPATPFPLETTDGNDSSSPLAATHPSPRTPACHLPEPAAPTPLSCLQHSPATTCRGS

SEQ ID NO: 10961 - DNA, 3178 bp, Homo sapiens
cggccgcggttccctccctgctgcttactcggcgcccgcgcctcgggccgtcgggagcggagcctcctcgggaccaggacttcagggccacaggtgctgccaagatgctccagggcacctgctccgtgctcctgctctggggaatcctgggggccatccaggcccagcagcaggaggtcatctcgccggacactaccgagagaaacaacaactgcccagagaagaccgactgccccatccacgtgtacttcgtgctggacacctcggagagcgtcaccatgcagtcccccacggacatcctgctcttccacatgaagcagttcgtgccgcagttcatcagccagctgcagaacgagttctacctggaccaggtggcgctgagctggcgctacggcggcctgcacttctctgaccaggtggaggtgttcagcccaccgggcagcgaccgggcctccttcatcaagaacctgcagggcatcagctccttccgccgcggcaccttcaccgactgcgcgctggccaacatgacggagcagatccggcaggaccgcagcaagggcaccgtccacttcgccgtggtcatcaccgacggccacgtcaccggcagcccctgcgggggcatcaagctgcaggccgagcgggcccgcgaggagggcatccggctcttcgccgtggcccccaaccagaacctgaaggagcagggcctgcgggacatcgccagcacgccgcacgagctctaccgcaacgactacgccaccatgctgcccgactccaccgagatcgaccaggacaccatcaaccgcatcatcaaggtcatgaaacacgaagcctacggagagtgctacaaggtgagctgcctggaaatccctgggccctctggccccaagggctaccgtggacagaagggtgccaagggcaacatgggtgagccgggagagcctggccagaagggaagacagggagacccgggcatcgaaggccccattggattcccaggacccaagggcgttcctggcttcaaaggagagaagggtgaatttggagccgacggtcgcaagggggcccctggcctggctggcaagaacgggaccgatggacagaagggcaagctggggcgcatcggacctcctggctgcaagggagaccctggaaaccggggccccgacggttacccgggggaagcagggagtccaggggagcgaggagaccaaggcggcaagggggaccctggccgcccaggacgcagagggcccccgggagaaatcggggccaagggaagcaaggggtatcaaggcaacagtggagccccaggaagtcctggtgtgaaaggagccaagggcgggcctgggccccgcggacccaaaggcgagccggggcgcaggggagaccccggcaccaagggcagcccaggcagcgatggccccaagggggagaagggggaccctggccctgaggggccccgcggcctggctggagaggttggcaacaaaggagccaagggagaccgaggcttgcctggacccagaggcccccagggagctcttggggagcccggaaagcagggatctcggggagaccccggtgatgcaggaccccgtggagactcaggacagccaggccccaagggagaccccggcaggcctggattcagctacccaggaccccgaggagcacccggagaaaaaggcgagcccggcccacgcggccccgagggaggccgaggcgactttggcttgaaaggagaacctgggaggaaaggagagaaaggagagcctgcggatcctggtccccctggtgagccaggccctcgggggccaagaggagtcccaggacccgagggtgagcccggcccccctggagaccccggtctcacggagtgtgacgtcatgacctacgtgagggagacctgcgggtgctgcgactgtgagaagcgctgtggcgccctggacgtggtcttcgtcatcgacagctccgagagcattgggtacaccaacttcacactggagaagaacttcgtcatcaacgtggtcaacaggctgggtgccatcgctaaggaccccaagtccgagacagggacgcgtgtgggcgtggtgcagtacagccacgagggcacctttgaggccatccagctggacgacgaacgtatcgactccctgtcgagcttcaaggaggctgtcaagaacctcgagtggattgcgggcggcacctggacaccctcagccctcaagtttgcctacgaccgcctcatcaaggagagccggcgccagaagacacgtgtgtttgcggtggtcatcacggacgggcgccacgaccctcgggacgatgacctcaacttgcgggcgctgtgcgaccgcgacgtcacagtgacggccatcggcatcggggacatgttccacgagaagcacgagagtgaaaacctctactccatcgcctgcgacaagccacagcaggtgcgcaacatgacgctgttctccgacctggtcgctgagaagttcatcgatgacatggaggacgtcctctgcccggaccctcagatcgtgtgcccagaccttccctgccaaacagatgcaccgtggcctggcggcgagcccccggtcaccttcctccgcacggaagaggggccggacgccaccttccccaggaccattcccctgatccaacagttgctaaacgccacggagctcacgcaggacccggccgcctactcccagctggtggccgtgctggtctacaccgccgagcgggccaagttcgccaccggggtagagcggcaggactggatggagctgttcattgacacctttaagctggtgcacagggacatcgtgggggaccccgagaccgcgctggccctctgctaaagcccgggcacccgcccagccgggctgggccctccctgccacactagcttcccagggctgcccccgacaggctggctctcagtggaggccagagatctggaatcggggtcagcggggctacagtccttccaggggctctggggcagctcccagcctcttcccatgctggtggccaccgtgtcccttgctgcggctgcatcttccagtctctcctccgtcttcctgtggccgctctctttataagaaccctggtcattgaatttaaggcccaccccaagtccagaatgacctcgcaagacccttaactcactcccgtc

SEQ ID NO: 10962 - protein, 918 aa, Homo sapiens; identical to SEQ ID NO: 1698

SEQ ID NO: 10963 - DNA, 3471 bp, Homo sapiens
cggccgcggttccctccctgctgcttactcggcgcccgcgcctcgggccgtcgggagcggagcctcctcgggaccaggacttcagggccacaggtgctgccaagatgctccagggcacctgctccgtgctcctgctctggggaatcctgggggccatccaggcccagcagcaggaggtcatctcgccggacactaccgagagaaacaacaactgcccagagaagaccgactgccccatccacgtgtacttcgtgctggacacctcggagagcgtcaccatgcagtcccccacggacatcctgctcttccacatgaagcagttcgtgccgcagttcatcagccagctgcagaacgagttctacctggaccaggtggcgctgagctggcgctacggcggcctgcacttctctgaccaggtggaggtgttcagcccaccgggcagcgaccgggcctccttcatcaagaacctgcagggcatcagctccttccgccgcggcaccttcaccgactgcgcgctggccaacatgacggagcagatccggcaggaccgcagcaagggcaccgtccacttcgccgtggtcatcaccgacggccacgtcaccggcagcccctgcgggggcatcaagctgcaggccgagcgggcccgcgaggagggcatccggctcttcgccgtggcccccaaccagaacctgaaggagcagggcctgcgggacatcgccagcacgccgcacgagctctaccgcaacgactacgccaccatgctgcccgactccaccgagatcgaccaggacaccatcaaccgcatcatcaaggtcatgaaacacgaagcctacggagagtgctacaaggtgagctgcctggaaatccctgggccctctggccccaagggctaccgtggacagaagggtgccaagggcaacatgggtgagccgggagagcctggccagaagggaagacagggagacccgggcatcgaaggccccattggattcccaggacccaagggcgttcctggcttcaaaggagagaagggtgaatttggagccgacggtcgcaagggggcccctggcctggctggcaagaacgggaccgatggacagaagggcaagctggggcgcatcggacctcctggctgcaagggagaccctggaaaccggggccccgacggttacccgggggaagcagggagtccaggggagcgaggagaccaaggcggcaagggggaccctggccgcccaggacgcagagggcccccgggagaaatcggggccaagggaagcaaggggtatcaaggcaacagtggagccccaggaagtcctggtgtgaaaggagccaagggcgggcctgggccccgcggacccaaaggcgagccggggcgcaggggagaccccggcaccaagggcagcccaggcagcgatggccccaagggggagaagggggaccctggccctgaggggccccgcggcctggctggagaggttggcaacaaaggagccaagggagaccgaggcttgcctggacccagaggcccccagggagctcttggggagcccggaaagcagggatctcggggagaccccggtgatgcaggaccccgtggagactcaggacagccaggccccaagggagaccccggcaggcctggattcagctacccaggaccccgaggagcacccggagaaaaaggcgagcccggcccacgcggccccgagggaggccgaggcgactttggcttgaaaggagaacctgggaggaaaggagagaaaggagagcctgcggatcctggtccccctggtgagccaggccctcgggggccaagaggagtcccaggacccgagggtgagcccggcccccctggagaccccggtctcacggagtgtgacgtcatgacctacgtgagggagacctgcgggtgctgcgactgtgagaagcgctgtggcgccctggacgtggtcttcgtcatcgacagctccgagagcattgggtacaccaacttcacactggagaagaacttcgtcatcaacgtggtcaacaggctgggtgccatcgctaaggaccccaagtccgagacagggacgcgtgtgggcgtggtgcagtacagccacgagggcacctttgaggccatccagctggacgacgaacgtatcgactccctgtcgagcttcaaggaggctgtcaagaacctcgagtggattgcgggcggcacctggacaccctcagccctcaagtttgcctacgaccgcctcatcaaggagagccggcgccagaagacacgtgtgtttgcggtggtcatcacggacgggcgccacgaccctcgggacgatgacctcaacttgcgggcgctgtgcgaccgcgacgtcacagtgacggccatcggcatcggggacatgttccacgagaagcacgagagtgaaaacctctactccatcgcctgcgacaagccacagcaggtgcgcaacatgacgctgttctccgacctggtcgctgagaagttcatcgatgacatggaggacgtcctctgcccggaccctcagatcgtgtgcccagaccttccctgccaaacaggtttggacggagctgttttgtgctgaaaggttttctcggggtccgtggtgtcccccaaaggtgccaccgtgcgggtctcctagctccctgccagcttcctgtccctgtgctcactgcccccacgcctcctgccaaggccgagccacacacccgctccacctgcatttcctctaccgactcgccagcccaaatgccgctcttcactctggcctcgctgagcggctgcccgaggaggagctctaggccgacgcccaccgcaggccttacagtcttctctggacgctcccttgcagatgcaccgtggcctggcggcgagcccccggtcaccttcctccgcacggaagaggggccggacgccaccttccccaggaccattcccctgatccaacagttgctaaacgccacggagctcacgcaggacccggccgcctactcccagctggtggccgtgctggtctacaccgccgagcgggccaagttcgccaccggggtagagcggcaggactggatggagctgttcattgacacctttaagctggtgcacagggacatcgtgggggaccccgagaccgcgctggccctctgctaaagcccgggcacccgcccagccgggctgggccctccctgccacactagcttcccagggctgcccccgacaggctggctctcagtggaggccagagatctggaatcggggtcagcggggctacagtccttccaggggctctggggcagctcccagcctcttcccatgctggtggccaccgtgtcccttgctgcggctgcatcttccagtctctcctccgtcttcctgtggccgctctctttataagaaccctggtcattgaatttaaggcccaccccaagtccagaatgacctcgcaagacccttaactcactcccgtc

SEQ ID NO: 10964 - protein, 828 aa, Homo sapiens; identical to SEQ ID NO: 1700

SEQ ID NO: 10965 - DNA, 6520 bp, Homo sapiens
cggccgcggttccctccctgctgcttactcggcgcccgcgcctcgggccgtcgggagcggagcctcctcgggaccaggacttcagggccacaggtgctgccaagatgctccagggcacctgctccgtgctcctgctctggggaatcctgggggccatccaggcccagcagcaggaggtcatctcgccggacactaccgagagaaacaacaactgcccagagaagaccgactgccccatccacgtgtacttcgtgctggacacctcggagagcgtcaccatgcagtcccccacggacatcctgctcttccacatgaagcagttcgtgccgcagttcatcagccagctgcagaacgagttctacctggaccaggtggcgctgagctggcgctacggcggcctgcacttctctgaccaggtggaggtgttcagcccaccgggcagcgaccgggcctccttcatcaagaacctgcagggcatcagctccttccgccgcggcaccttcaccgactgcgcgctggccaacatgacggagcagatccggcaggaccgcagcaagggcaccgtccacttcgccgtggtcatcaccgacggccacgtcaccggcagcccctgcgggggcatcaagctgcaggccgagcgggcccgcgaggagggcatccggctcttcgccgtggcccccaaccagaacctgaaggagcagggcctgcgggacatcgccagcacgccgcacgagctctaccgcaacgactacgccaccatgctgcccgactccaccgagatcgaccaggacaccatcaaccgcatcatcaaggtcatgaaacacgaagcctacggagagtgctacaaggtgagctgcctggaaatccctgggccctctggccccaagggctaccgtggacagaagggtgccaagggcaacatgggtgagccgggagagcctggccagaagggaagacagggagacccgggcatcgaaggccccattggattcccaggacccaagggcgttcctggcttcaaaggagagaagggtgaatttggagccgacggtcgcaagggggcccctggcctggctggcaagaacgggaccgatggacagaagggcaagctggggcgcatcggacctcctggctgcaagggagaccctggaaaccggggccccgacggttacccgggggaagcagggagtccaggggagcgaggagaccaaggcggcaagggggaccctggccgcccaggacgcagagggcccccgggagaaatcggggccaagggaagcaaggggtatcaaggcaacagtggagccccaggaagtcctggtgtgaaaggagccaagggcgggcctgggccccgcggacccaaaggcgagccggggcgcaggggagaccccggcaccaagggcagcccaggcagcgatggccccaagggggagaagggggaccctggccctgaggggccccgcggcctggctggagaggttggcaacaaaggagccaagggagaccgaggcttgcctggacccagaggcccccagggagctcttggggagcccggaaagcagggatctcggggagaccccggtgatgcaggaccccgtggagactcaggacagccaggccccaagggagaccccggcaggcctggattcagctacccaggaccccgaggagcacccggagaaaaaggcgagcccggcccacgcggccccgagggaggccgaggcgactttggcttgaaaggagaacctgggaggaaaggagagaaaggagagcctgcggatcctggtccccctggtgagccaggccctcgggggccaagaggagtcccaggacccgagggtgagcccggcccccctggagaccccggtctcacggagtgtgacgtcatgacctacgtgagggagacctgcgggtgctgcgactgtgagaagcgctgtggcgccctggacgtggtcttcgtcatcgacagctccgagagcattgggtacaccaacttcacactggagaagaacttcgtcatcaacgtggtcaacaggctgggtgccatcgctaaggaccccaagtccgagacagggacgcgtgtgggcgtggtgcagtacagccacgagggcacctttgaggccatccagctggacgacgaacgtatcgactccctgtcgagcttcaaggaggctgtcaagaacctcgagtggattgcgggcggcacctggacaccctcagccctcaagtttgcctacgaccgcctcatcaaggagagccggcgccagaagacacgtgtgtttgcggtggtcatcacggacgggcgccacgaccctcgggacgatgacctcaacttgcgggcgctgtgcgaccgcgacgtcacagtgacggccatcggcatcggggacatgttccacgagaagcacgagagtgaaaacctctactccatcgcctgcgacaagccacagcaggtgcgcaacatgacgctgttctccgacctggtcgctgagaagttcatcgatgacatggaggacgtcctctgcccggaccctcagatcgtgtgcccagaccttccctgccaaacaggtttggacggagctgttttgtgctgaaaggttttctcggggtccgtggtgtcccccaaaggtgccaccgtgcgggtctcctagctccctgccagcttcctgtccctgtgctcactgcccccacgcctcctgccaaggccgagccacacacccgctccacctgcatttcctctaccgactcgccagcccaaatgccgctcttcactctggcctcgctgagcggctgcccgaggaggagctctaggccgacgcccaccgcaggccttacagtcttctctggacgctcccttgcagatgcaccgtggcctggcggcgagcccccggtcaccttcctccgcacggaagaggggccggacgccaccttccccaggaccattcccctgatccaacagttgctaaacgccacggagctcacgcaggacccggccgcctactcccagctggtggccgtgctggtctacaccgccgagcgggccaagttcgccaccggggtagagcggcaggactggatggagctgttcattgacacctttaagctggtgcacagggacatcgtgggggaccccgagaccgcgctggccctctgctaaagcccgggcacccgcccagccgggctgggccctccctgccacactagcttcccagggctgcccccgacaggctggctctcagtggaggccagagatctggaatcggggtcagcggggctacagtccttccaggggctctggggcagctcccagcctcttcccatgctggtggccaccgtgtcccttgctgcggctgcatcttccagtctctcctccgtcttcctgtggccgctctctttataagaaccctggtcattgaatttaaggcccaccccaagtccagaatgacctcgcaagacccttaactcactcccgtctgcagagtccttctttgctgcatcaggtcaccctcacaggctccagggtttgggtgtggaagtctttggaggcccttacttagcggcccagctgggctgccgtgcgtctgggatggggctgagggagggtgctgcccaggtgctggaggatgttccagcaccaggttccagcggagcctcggaaacaggccccagaggctggtgagcctcgctgggtgtgggcactaatcccgtgcatggtgactcgtgggcgctcacggcccacctggtggcaggtgaaggcttccggttgggcagcagatagtcctgggggaagctggcagtcctggcaccatgacgtatctgggctggtgtcatgcacagtagggcgaatggccacagctgcctgccagcagccctgatcccggggtgtctgcacccttccagcccaacctctgggtctccaaaagcacagtcgggggagcatccaccaggcacaacctctgcggtcctcagaggactgagcagagaatcccagggtccacaatgttggggagcggcagggatcaccatccaaagggagcggcccccacggcgagctgaccccgacgttctgactgcaggagccctcatccaggctgggctcctgccgggcacggctgtgaccatttctcagggccaggttctcgtccccacacccactgcacagggcaggccaggctggtcttcccactgtggggatgaaggatcctccacaggaggaggagagcagagtccacagacatcccaacagcctcagcctccctgtgcctggccggcccccacagcttccccgtctcctccaggccccacagacactgatgaatggacagagacccccaaaaccagctgccccttgcatgtctgtctccatatgtttggtgacagcagtgaaaatgttattagttttgagggggtttgggaagcccagcggtacctgaggagtttctggacatttaagccggttcctaggtgtggccttaacagggaggctgcccttcctttcactgaatgagctgcgtcactcataagctcactgagggaaccccatctgccagctcgtgcgtgctcagacggcgtccatgtctcaagcgttctgtgaaggctgcggtgcagcgtgaggtcaccctgctgtgttcagagctttgctcactgcctgcggggctggaccgttgcacctccagggcccccagaaaccgagtttcgggtcagggtcctctgtgtgcattcctgggggtccatgtaccagctgtgacgacgtccaggggttgggctgagaagcagacacccttggggaaactggctctgtccctcccctcccccatcccaggagctgaggtcttggtgaggccacagggccaggtccacgcaaggactgtccgtgtcctgtcctgtggtctctggccccacgtgacacccacacgtgtggtaggcagcctggcctgggttgtggctatggccaggcccccaagctgtccccgatgcccagggctggtgaccacccaggcaggtgggggccccacttggtaacagagtcatagggcagaacccacctgggctgccacagaaggtctggctgcccctgtgcccactgctccccaccatggccaatcagaagagtcaggggctcctggtctttccgggagggacgtggcccagccagctctaggtgttctgagcagctctgggacccagcgattgaggggtcaggctgggggtgtcagagccagggtcctccttaagtacctcccacactacacagacagtggcccttttgtgggcagcaaattcttgagccatgaaaggatgctttgggccccttccctcccaggagggcagcctgtgcagggatggtgctcagcaggtggacagggcctggggcctgtgtcagggtctcaggcctgggagcaccagcagaggagatggcggctcccagcagtgccgcctgaaagtgtcttgggctaaggacccacacccagggctgccctgcagaaacgcccccgcagagcccagtggtctgtgaggttgcaggcagggtgcgaatggaagggcacaggtgcggggctggcacctgcccggtcctgcccacctcccctccgcccagcccgcacctgcgtctccccacagagctgtccgtggcacagtgcacgcagcggcccgtggacatcgtcttcctgctggacggctccgagcggctgggtgagcagaacttccacaaggcccggcgcttcgtggagcaggtggcgcggcggctgacgctggcccggagggacgacgaccctctcaacgcacgcgtggcgctgctgcagtttggtggccccggcgagcagcaggtggccttcccgctgagccacaacctcacggccatccacgaggcgctggagaccacacaatacctgaactccttctcgcacgtgggcgcaggcgtggtgcacgccatcaatgccatcgtgcgcagcccgcgtggcggggcccggaggcacgcagagctgtccttcgtgttcctcacggacggcgtcacgggcaacgacagtctgcacgagtcggcgcactccatgcgcaagcagaacgtggtacccaccgtgctggccttgggcagcgacgtggacatggacgtgctcaccacgctcagcctgggtgaccgcgccgccgtgttccacgagaaggactatgacagcctggcgcaacccggcttcttcgaccgcttcatccgctggatctgctagcgccgccgcccgggccccgcagtcgagggtcgtgagcccaccccgtccatggtgctaagcgggcccgggtcccacacggccagcaccgctgctcactcggacgacgccctgggcctgcacctctccagctcctcccacggggtccccgtagccccggcccccgcccagccccaggtctccccaggccctccgcaggctgcccggcctccctccccctgcagccatcccaaggctcctgacctacctggcccctgagctctggagcaagccctgacccaataaaggctttgaacccattgcgtgcc

SEQ ID NO: 10966 - protein, 828 aa, Homo sapiens; identical to SEQ ID NO: 1700

SEQ ID NO: 10967 - DNA, 3469 bp, Homo sapiens
cggccgcggttccctccctgctgcttactcggcgcccgcgcctcgggccgtcgggagcggagcctcctcgggaccaggacttcagggccacaggtgctgccaagatgctccagggcacctgctccgtgctcctgctctggggaatcctgggggccatccaggcccagcagcaggaggtcatctcgccggacactaccgagagaaacaacaactgcccagagaagaccgactgccccatccacgtgtacttcgtgctggacacctcggagagcgtcaccatgcagtcccccacggacatcctgctcttccacatgaagcagttcgtgccgcagttcatcagccagctgcagaacgagttctacctggaccaggtggcgctgagctggcgctacggcggcctgcacttctctgaccaggtggaggtgttcagcccaccgggcagcgaccgggcctccttcatcaagaacctgcagggcatcagctccttccgccgcggcaccttcaccgactgcgcgctggccaacatgacggagcagatccggcaggaccgcagcaagggcaccgtccacttcgccgtggtcatcaccgacggccacgtcaccggcagcccctgcgggggcatcaagctgcaggccgagcgggcccgcgaggagggcatccggctcttcgccgtggcccccaaccagaacctgaaggagcagggcctgcgggacatcgccagcacgccgcacgagctctaccgcaacgactacgccaccatgctgcccgactccaccgagatcgaccaggacaccatcaaccgcatcatcaaggtcatgaaacacgaagcctacggagagtgctacaaggtgagctgcctggaaatccctgggccctctggccccaagggctaccgtggacagaagggtgccaagggcaacatgggtgagccgggagagcctggccagaagggaagacagggagacccgggcatcgaaggccccattggattcccaggacccaagggcgttcctggcttcaaaggagagaagggtgaatttggagccgacggtcgcaagggggcccctggcctggctggcaagaacgggaccgatggacagaagggcaagctggggcgcatcggacctcctggctgcaagggagaccctggaaaccggggccccgacggttacccgggggaagcagggagtccaggggagcgaggagaccaaggcggcaagggggaccctggccgcccaggacgcagagggcccccgggagaaatcggggccaagggaagcaaggggtatcaaggcaacagtggagccccaggaagtcctggtgtgaaaggagccaagggcgggcctgggccccgcggacccaaaggcgagccggggcgcaggggagaccccggcaccaagggcagcccaggcagcgatggccccaagggggagaagggggaccctggccctgaggggccccgcggcctggctggagaggttggcaacaaaggagccaagggagaccgaggcttgcctggacccagaggcccccagggagctcttggggagcccggaaagcagggatctcggggagaccccggtgatgcaggaccccgtggagactcaggacagccaggccccaagggagaccccggcaggcctggattcagctacccaggaccccgaggagcacccggagaaaaaggcgagcccggcccacgcggccccgagggaggccgaggcgactttggcttgaaaggagaacctgggaggaaaggagagaaaggagagcctgcggatcctggtccccctggtgagccaggccctcgggggccaagaggagtcccaggacccgagggtgagcccggcccccctggagaccccggtctcacggagtgtgacgtcatgacctacgtgagggagacctgcgggtgctgcgactgtgagaagcgctgtggcgccctggacgtggtcttcgtcatcgacagctccgagagcattgggtacaccaacttcacactggagaagaacttcgtcatcaacgtggtcaacaggctgggtgccatcgctaaggaccccaagtccgagacagggacgcgtgtgggcgtggtgcagtacagccacgagggcacctttgaggccatccagctggacgacgaacgtatcgactccctgtcgagcttcaaggaggctgtcaagaacctcgagtggattgcgggcggcacctggacaccctcagccctcaagtttgcctacgaccgcctcatcaaggagagccggcgccagaagacacgtgtgtttgcggtggtcatcacggacgggcgccacgaccctcgggacgatgacctcaacttgcgggcgctgtgcgaccgcgacgtcacagtgacggccatcggcatcggggacatgttccacgagaagcacgagagtgaaaacctctactccatcgcctgcgacaagccacagcaggtgcgcaacatgacgctgttctccgacctggtcgctgagaagttcatcgatgacatggaggacgtcctctgcccggaccctcagatcgtgtgcccagaccttccctgccaaacagagctgtccgtggcacagtgcacgcagcggcccgtggacatcgtcttcctgctggacggctccgagcggctgggtgagcagaacttccacaaggcccggcgcttcgtggagcaggtggcgcggcggctgacgctggcccggagggacgacgaccctctcaacgcacgcgtggcgctgctgcagtttggtggccccggcgagcagcaggtggccttcccgctgagccacaacctcacggccatccacgaggcgctggagaccacacaatacctgaactccttctcgcacgtgggcgcaggcgtggtgcacgccatcaatgccatcgtgcgcagcccgcgtggcggggcccggaggcacgcagagctgtccttcgtgttcctcacggacggcgtcacgggcaacgacagtctgcacgagtcggcgcactccatgcgcaagcagaacgtggtacccaccgtgctggccttgggcagcgacgtggacatggacgtgctcaccacgctcagcctgggtgaccgcgccgccgtgttccacgagaaggactatgacagcctggcgcaacccggcttcttcgaccgcttcatccgctggatctgctagcgccgccgcccgggccccgcagtcgagggtcgtgagcccaccccgtccatggtgctaagcgggcccgggtcccacacggccagcaccgctgctcactcggacgacgccctgggcctgcacctctccagctcctcccacggggtccccgtagccccggcccccgcccagccccaggtctccccaggccctccgcaggctgcccggcctccctccccctgcagccatcccaaggctcctgacctacctggcccctgagctctggagcaagccctgacccaataaaggctttgaacccattgcgtgcc

SEQ ID NO: 10968 - protein, 1019 aa, Homo sapiens; identical to SEQ ID NO: 1696

SEQ ID NO: 10969 - DNA, 6227 bp, Homo sapiens
cggccgcggttccctccctgctgcttactcggcgcccgcgcctcgggccgtcgggagcggagcctcctcgggaccaggacttcagggccacaggtgctgccaagatgctccagggcacctgctccgtgctcctgctctggggaatcctgggggccatccaggcccagcagcaggaggtcatctcgccggacactaccgagagaaacaacaactgcccagagaagaccgactgccccatccacgtgtacttcgtgctggacacctcggagagcgtcaccatgcagtcccccacggacatcctgctcttccacatgaagcagttcgtgccgcagttcatcagccagctgcagaacgagttctacctggaccaggtggcgctgagctggcgctacggcggcctgcacttctctgaccaggtggaggtgttcagcccaccgggcagcgaccgggcctccttcatcaagaacctgcagggcatcagctccttccgccgcggcaccttcaccgactgcgcgctggccaacatgacggagcagatccggcaggaccgcagcaagggcaccgtccacttcgccgtggtcatcaccgacggccacgtcaccggcagcccctgcgggggcatcaagctgcaggccgagcgggcccgcgaggagggcatccggctcttcgccgtggcccccaaccagaacctgaaggagcagggcctgcgggacatcgccagcacgccgcacgagctctaccgcaacgactacgccaccatgctgcccgactccaccgagatcgaccaggacaccatcaaccgcatcatcaaggtcatgaaacacgaagcctacggagagtgctacaaggtgagctgcctggaaatccctgggccctctggccccaagggctaccgtggacagaagggtgccaagggcaacatgggtgagccgggagagcctggccagaagggaagacagggagacccgggcatcgaaggccccattggattcccaggacccaagggcgttcctggcttcaaaggagagaagggtgaatttggagccgacggtcgcaagggggcccctggcctggctggcaagaacgggaccgatggacagaagggcaagctggggcgcatcggacctcctggctgcaagggagaccctggaaaccggggccccgacggttacccgggggaagcagggagtccaggggagcgaggagaccaaggcggcaagggggaccctggccgcccaggacgcagagggcccccgggagaaatcggggccaagggaagcaaggggtatcaaggcaacagtggagccccaggaagtcctggtgtgaaaggagccaagggcgggcctgggccccgcggacccaaaggcgagccggggcgcaggggagaccccggcaccaagggcagcccaggcagcgatggccccaagggggagaagggggaccctggccctgaggggccccgcggcctggctggagaggttggcaacaaaggagccaagggagaccgaggcttgcctggacccagaggcccccagggagctcttggggagcccggaaagcagggatctcggggagaccccggtgatgcaggaccccgtggagactcaggacagccaggccccaagggagaccccggcaggcctggattcagctacccaggaccccgaggagcacccggagaaaaaggcgagcccggcccacgcggccccgagggaggccgaggcgactttggcttgaaaggagaacctgggaggaaaggagagaaaggagagcctgcggatcctggtccccctggtgagccaggccctcgggggccaagaggagtcccaggacccgagggtgagcccggcccccctggagaccccggtctcacggagtgtgacgtcatgacctacgtgagggagacctgcgggtgctgcgactgtgagaagcgctgtggcgccctggacgtggtcttcgtcatcgacagctccgagagcattgggtacaccaacttcacactggagaagaacttcgtcatcaacgtggtcaacaggctgggtgccatcgctaaggaccccaagtccgagacagggacgcgtgtgggcgtggtgcagtacagccacgagggcacctttgaggccatccagctggacgacgaacgtatcgactccctgtcgagcttcaaggaggctgtcaagaacctcgagtggattgcgggcggcacctggacaccctcagccctcaagtttgcctacgaccgcctcatcaaggagagccggcgccagaagacacgtgtgtttgcggtggtcatcacggacgggcgccacgaccctcgggacgatgacctcaacttgcgggcgctgtgcgaccgcgacgtcacagtgacggccatcggcatcggggacatgttccacgagaagcacgagagtgaaaacctctactccatcgcctgcgacaagccacagcaggtgcgcaacatgacgctgttctccgacctggtcgctgagaagttcatcgatgacatggaggacgtcctctgcccggaccctcagatcgtgtgcccagaccttccctgccaaacagatgcaccgtggcctggcggcgagcccccggtcaccttcctccgcacggaagaggggccggacgccaccttccccaggaccattcccctgatccaacagttgctaaacgccacggagctcacgcaggacccggccgcctactcccagctggtggccgtgctggtctacaccgccgagcgggccaagttcgccaccggggtagagcggcaggactggatggagctgttcattgacacctttaagctggtgcacagggacatcgtgggggaccccgagaccgcgctggccctctgctaaagcccgggcacccgcccagccgggctgggccctccctgccacactagcttcccagggctgcccccgacaggctggctctcagtggaggccagagatctggaatcggggtcagcggggctacagtccttccaggggctctggggcagctcccagcctcttcccatgctggtggccaccgtgtcccttgctgcggctgcatcttccagtctctcctccgtcttcctgtggccgctctctttataagaaccctggtcattgaatttaaggcccaccccaagtccagaatgacctcgcaagacccttaactcactcccgtctgcagagtccttctttgctgcatcaggtcaccctcacaggctccagggtttgggtgtggaagtctttggaggcccttacttagcggcccagctgggctgccgtgcgtctgggatggggctgagggagggtgctgcccaggtgctggaggatgttccagcaccaggttccagcggagcctcggaaacaggccccagaggctggtgagcctcgctgggtgtgggcactaatcccgtgcatggtgactcgtgggcgctcacggcccacctggtggcaggtgaaggcttccggttgggcagcagatagtcctgggggaagctggcagtcctggcaccatgacgtatctgggctggtgtcatgcacagtagggcgaatggccacagctgcctgccagcagccctgatcccggggtgtctgcacccttccagcccaacctctgggtctccaaaagcacagtcgggggagcatccaccaggcacaacctctgcggtcctcagaggactgagcagagaatcccagggtccacaatgttggggagcggcagggatcaccatccaaagggagcggcccccacggcgagctgaccccgacgttctgactgcaggagccctcatccaggctgggctcctgccgggcacggctgtgaccatttctcagggccaggttctcgtccccacacccactgcacagggcaggccaggctggtcttcccactgtggggatgaaggatcctccacaggaggaggagagcagagtccacagacatcccaacagcctcagcctccctgtgcctggccggcccccacagcttccccgtctcctccaggccccacagacactgatgaatggacagagacccccaaaaccagctgccccttgcatgtctgtctccatatgtttggtgacagcagtgaaaatgttattagttttgagggggtttgggaagcccagcggtacctgaggagtttctggacatttaagccggttcctaggtgtggccttaacagggaggctgcccttcctttcactgaatgagctgcgtcactcataagctcactgagggaaccccatctgccagctcgtgcgtgctcagacggcgtccatgtctcaagcgttctgtgaaggctgcggtgcagcgtgaggtcaccctgctgtgttcagagctttgctcactgcctgcggggctggaccgttgcacctccagggcccccagaaaccgagtttcgggtcagggtcctctgtgtgcattcctgggggtccatgtaccagctgtgacgacgtccaggggttgggctgagaagcagacacccttggggaaactggctctgtccctcccctcccccatcccaggagctgaggtcttggtgaggccacagggccaggtccacgcaaggactgtccgtgtcctgtcctgtggtctctggccccacgtgacacccacacgtgtggtaggcagcctggcctgggttgtggctatggccaggcccccaagctgtccccgatgcccagggctggtgaccacccaggcaggtgggggccccacttggtaacagagtcatagggcagaacccacctgggctgccacagaaggtctggctgcccctgtgcccactgctccccaccatggccaatcagaagagtcaggggctcctggtctttccgggagggacgtggcccagccagctctaggtgttctgagcagctctgggacccagcgattgaggggtcaggctgggggtgtcagagccagggtcctccttaagtacctcccacactacacagacagtggcccttttgtgggcagcaaattcttgagccatgaaaggatgctttgggccccttccctcccaggagggcagcctgtgcagggatggtgctcagcaggtggacagggcctggggcctgtgtcagggtctcaggcctgggagcaccagcagaggagatggcggctcccagcagtgccgcctgaaagtgtcttgggctaaggacccacacccagggctgccctgcagaaacgcccccgcagagcccagtggtctgtgaggttgcaggcagggtgcgaatggaagggcacaggtgcggggctggcacctgcccggtcctgcccacctcccctccgcccagcccgcacctgcgtctccccacagagctgtccgtggcacagtgcacgcagcggcccgtggacatcgtcttcctgctggacggctccgagcggctgggtgagcagaacttccacaaggcccggcgcttcgtggagcaggtggcgcggcggctgacgctggcccggagggacgacgaccctctcaacgcacgcgtggcgctgctgcagtttggtggccccggcgagcagcaggtggccttcccgctgagccacaacctcacggccatccacgaggcgctggagaccacacaatacctgaactccttctcgcacgtgggcgcaggcgtggtgcacgccatcaatgccatcgtgcgcagcccgcgtggcggggcccggaggcacgcagagctgtccttcgtgttcctcacggacggcgtcacgggcaacgacagtctgcacgagtcggcgcactccatgcgcaagcagaacgtggtacccaccgtgctggccttgggcagcgacgtggacatggacgtgctcaccacgctcagcctgggtgaccgcgccgccgtgttccacgagaaggactatgacagcctggcgcaacccggcttcttcgaccgcttcatccgctggatctgctagcgccgccgcccgggccccgcagtcgagggtcgtgagcccaccccgtccatggtgctaagcgggcccgggtcccacacggccagcaccgctgctcactcggacgacgccctgggcctgcacctctccagctcctcccacggggtccccgtagccccggcccccgcccagccccaggtctccccaggccctccgcaggctgcccggcctccctccccctgcagccatcccaaggctcctgacctacctggcccctgagctctggagcaagccctgacccaataaaggctttgaacccattgcgtgcc

SEQ ID NO: 10970 - protein, 918 aa, Homo sapiens; identical to SEQ ID NO: 1698

SEQ ID NO: 10971 - DNA, 1773 bp, Homo sapiens
ggcgcccgcgcctcgggccgtcgggagcggagcctcctcgggaccagaacctgggaggaaaggagagaaaggagagcctgcggatcctggtccccctggtgagccaggccctcgggggccaagaggagtcccaggacccgagggtgagcccggcccccctggagaccccggtctcacggagtgtgacgtcatgacctacgtgagggagacctgcgggtgctgcgactgtgagaagcgctgtggcgccctggacgtggtcttcgtcatcgacagctccgagagcattgggtacaccaacttcacactggagaagaacttcgtcatcaacgtggtcaacaggctgggtgccatcgctaaggaccccaagtccgagacagggacgcgtgtgggcgtggtgcagtacagccacgagggcacctttgaggccatccagctggacgacgaacgtatcgactccctgtcgagcttcaaggaggctgtcaagaacctcgagtggattgcgggcggcacctggacaccctcagccctcaagtttgcctacgaccgcctcatcaaggagagccggcgccagaagacacgtgtgtttgcggtggtcatcacggacgggcgccacgaccctcgggacgatgacctcaacttgcgggcgctgtgcgaccgcgacgtcacagtgacggccatcggcatcggggacatgttccacgagaagcacgagagtgaaaacctctactccatcgcctgcgacaagccacagcaggtgcgcaacatgacgctgttctccgacctggtcgctgagaagttcatcgatgacatggaggacgtcctctgcccggaccctcagatcgtgtgcccagaccttccctgccaaacagagctgtccgtggcacagtgcacgcagcggcccgtggacatcgtcttcctgctggacggctccgagcggctgggtgagcagaacttccacaaggcccggcgcttcgtggagcaggtggcgcggcggctgacgctggcccggagggacgacgaccctctcaacgcacgcgtggcgctgctgcagtttggtggccccggcgagcagcaggtggccttcccgctgagccacaacctcacggccatccacgaggcgctggagaccacacaatacctgaactccttctcgcacgtgggcgcaggcgtggtgcacgccatcaatgccatcgtgcgcagcccgcgtggcggggcccggaggcacgcagagctgtccttcgtgttcctcacggacggcgtcacgggcaacgacagtctgcacgagtcggcgcactccatgcgcaagcagaacgtggtacccaccgtgctggccttgggcagcgacgtggacatggacgtgctcaccacgctcagcctgggtgaccgcgccgccgtgttccacgagaaggactatgacagcctggcgcaacccggcttcttcgaccgcttcatccgctggatctgctagcgccgccgcccgggccccgcagtcgagggtcgtgagcccaccccgtccatggtgctaagcgggcccgggtcccacacggccagcaccgctgctcactcggacgacgccctgggcctgcacctctccagctcctcccacggggtccccgtagccccggcccccgcccagccccaggtctccccaggccctccgcaggctgcccggcctccctccccctgcagccatcccaaggctcctgacctacctggcccctgagctctggagcaagccctgacccaataaaggctttgaacccattgcgtgcc

SEQ ID NO: 10972 - protein, 425 aa, Homo sapiens [sequence omitted]

SEQ ID NO: 10973 - DNA, 624 bp, Homo sapiens
atctcactatgttgcccagcctggtctctaactcctggcctcaagcagtcctccctgcctcggcctaccaaaatgttgggattccaggcgtgagctgcacccggcctttcttcccttctattttctgtcatggcttaagccaggcttggttttttaaacttgcctagaacacctgaccgagagccaaactctttggcttgtccctgatgggggcagagcctcacagcaccccatgtctcacagctccctcacgcccgcccaggttctcagggcatttcagcatctccttggcccctgctgagagtcgtgggctacacgttctgagaccctgccctgccacctgaggaatgtcccacccatgcaaccttctgtctctgcttcctcgtttcagtgctacaaggtgagctgcctggaaatccctgggccctctggccccaagggctaccgtggacagaagggtgccaagggcaacatgggtgagccgggagagcctggccagaagggaagacagggagacccgggcatcgaaggccccattggattcccaggacccaagggcgttcctggcttcaaaggagagaagggtgaatttggagccgacggtcgcaagggggcccctggcct

SEQ ID NO: 10974 - protein, 87 aa, Homo sapiens
MQPSVSASSFQCYKVSCLEIPGPSGPKGYRGQKGAKGNMGEPGEPGQKGRQGDPGIEGPIGFPGPKGVPGFKGEKGEFGADGRKGAP

SEQ ID NO: 10975 - DNA, 562 bp, Homo sapiens
cctgaggaatgtcccacccatgcaaccttctgtctctgcttcctcgtttcagtgctacaaggtgagctgcctggaaatccctgggccctctggccccaagggctaccgtggacagaagggtgccaagggcaacatgggtgagccgggagagcctggccagaagggaagacagggagacccgggcatcgaaggccccattggattcccaggacccaagggcgttcctggcttcaaaggagagaagggtgaatttggagccgacggtcgcaagggggcccctggcctggctggcaagaacgggaccgatggacagaagggcaagctggggcgcatcggacctcctggctgcaagggagaccctggaaaccgggtaagggccgtttgcacccctccttcagcctcggcccagggggtgtgggtgcctgaccgggtgggagggtagttgctgctgcagtgggagcgtgggttctcccggcagcccagcagccccagcccagcagccccagcccagcattctgccgggtcggagtcatgtgaggaactccccctgggagctcctggc

SEQ ID NO: 10976 - protein, 140 aa, Homo sapiens
MQPSVSASSFQCYKVSCLEIPGPSGPKGYRGQKGAKGNMGEPGEPGQKGRQGDPGIEGPIGFPGPKGVPGFKGEKGEFGADGRKGAPGLAGKNGTDGQKGKLGRIGPPGCKGDPGNRVRAVCTPPSASAQGVWVPDRVGG

SEQ ID NO: 10977 - DNA, 3366 bp, Homo sapiens
cagcgcgcgctcctgcagccccggcggagtcccggcggggagcgcccgcgtaggcaggcacccggggcagccctccgtcctcgccgcgcggcctgagaacccctgggccctgggcgagggggctgggctgtgcagcccccgaggctaactgggcgggatcgcagctgcaggggttgtgcgagcagccacggcggcacctgtgccctgcgggcacccaccctgcccctgccgaggcaggcgcccaccgccggcggtgatgcggctgtgaagccctagtcgattaacgtgacagtgtcaggtggacccacagccatcccacctccccctctggggagtgctgagagtgaggcagcatggaggagaggaagcatgagaccatgaacccagctcatgtcctctttgaccggtttgtccaggccaccacctgcaagggaaccctcaaggctttccaggagctctgtgaccacctggaactaaagccaaaggactaccgctccttctatcacaagctcaagtccaagcttaactactggaaagccaaagccctctgggcaaaattggacaaacggggcagtcacaaagactacaaaaagggaaaagcgtgcactaacaccaagtgtctcatcattggggctggcccctgtggtctccgtacagccatcgacttatccttactgggggccaaggtggttgttattgagaaacgagatgccttctcccgcaacaacgtcttgcatctctggccattcaccatacatgatctacgaggtctgggtgccaagaagttctatggcaagttctgtgctggagccatcgaccatatcagtatccgtcagctccaactaatacttttgaaagtagccttgatcctaggcattgaaatccacgtcaatgtggaattccaaggacttatacagcctcctgaggaccaagagaatgaacggataggctggcgggcactggtgcaccccaagactcatcctgtgtcagagtatgaatttgaagtgatcatcggtggggatggtcggaggaacaccttggaagggtttcgtcggaaagaattccgtggcaaactggccatcgccatcacggcaaattttatcaaccgaaatacaacagcagaagctaaagtggaagagatcagtggtgtggcttttatattcaaccaaaaatttttccaggaactgagggaagccacaggtattgacttggagaacatcgtttactacaaagatgacacacactatttcgttatgacagccaaaaagcagagtttgctggacaaaggagtgatactacatgactacgccgacacagagctcctgctttcccgagaaaacgtggaccaggaggctctgctcagctatgccagggaggcggcagacttctctacccagcagcagctgccgtctctggattttgccatcaatcactatgggcagcccgatgtggccatgtttgacttcacttgtatgtatgcctccgagaacgccgccttggtgcgggagcagaacggacaccagttactagtggctctggtcggggacagcctcctagagcctttctggccaatgggaacaggaatagcccggggctttctagctgctatggactctgcctggatggtccgaagttggtctctaggaacgagccctttggaagtgctggcagagagggaaagtatttacaggttgctgcctcagaccacccctgagaatgtgagtaagaacttcagccagtacagtatcgaccctgtcactcggtatcccaatatcaacgtcaacttcctccggccaagccaggtgcgccatttatatgatactggcgaaacaaaagatattcacctggaaatggagagcctggtgaattcccgaaccacccccaaattgactcgcaatgagtctgtagctcgttcaagcaaactgctgggttggtgccagaggcagacagatggctatgcaggggtaaacgtgacagatctcaccatgtcctggaaaagtggcttggccctttgtgcaattatccatagataccgccctgacctgatagattttgattctttggatgagcaaaatgtggagaagaataaccaactggcctttgacattgctgagaaggaattgggcatttctcccatcatgacaggcaaagaaatggcctccgtgggggagcctgataagctgtccatggtgatgtacctgactcagttctacgagatgtttaaggactccctcccctctagcgacaccttggacctaaatgccgaggagaaagcagtcctgatagccagcaccagatcccctatctccttcctaagcaaacttggccagaccatctctcggaagcgttctcccaaggataaaaaggaaaaggacttggatggtgctgggaagaggagaaagaccagtcaatcagaggaggaggaagctcctcggggccacagaggagaaagaccgaccctggtgagcactctgacagacaggaggatggacgttgccgttgggaaccagaacaaagtgaagtacatggcgacccagctgctggccaaatttgaagagaatgcgcccgcacagtccatcggcatacggagacagggctccatgaagaaggagttcccgcagaacctgggaggcagcgacacatgctacttctgccagaagcgggtctacgtgatggagaggctgagtgccgagggcaagttcttccaccggagctgcttcaagtgcgagtactgcgccaccaccctgcgcctctcggcctacgcctacgacatcgaggatggtaaattctactgtaagccacactactgctatcgactctctggctacgcacaaaggaagagaccggcagtggctcccctgtctggaaaggaggccaaaggacccctgcaggatggcgccaccacagatgcaaacggacgggccaacgccgtggccagctccactgagagaaccccaggttcaggcgtgaacggcctggaggagcccagcatcgccaagcgactgaggggcaccccagagcggatcgagctggagaactaccgcctgtccctgaggcaggctgaggcactgcaggaggtaccggaggagactcaggccgagcacaacctgagcagcgtgctggacacgggcgccgaggaggacgtcgccagcagagactgggtctccccatggttgcccaggatggtctcaaactcctgggctcaaatgatccacccacctcagcctcccacagtgctgggatcacagatgtgagctactgggcccagctgagcataagagtcttttctgtgtcacctttgtgttccctacagtgtctagcaagtgcgttgtgaggggaagataattgaataaattttatccaggt

SEQ ID NO: 10978 - protein, 966 aa, Homo sapiens
MEERKHETMNPAHVLFDRFVQATTCKGTLKAFQELCDHLELKPKDYRSFYHKLKSKLNYWKAKALWAKLDKRGSHKDYKKGKACTNTKCLIIGAGPCGLRTAIDLSLLGAKVVVIEKRDAFSRNNVLHLWPFTIHDLRGLGAKKFYGKFCAGAIDHISIRQLQLILLKVALILGIEIHVNVEFQGLIQPPEDQENERIGWRALVHPKTHPVSEYEFEVIIGGDGRRNTLEGFRRKEFRGKLAIAITANFINRNTTAEAKVEEISGVAFIFNQKFFQELREATGIDLENIVYYKDDTHYFVMTAKKQSLLDKGVILHDYADTELLLSRENVDQEALLSYAREAADFSTQQQLPSLDFAINHYGQPDVAMFDFTCMYASENAALVREQNGHQLLVALVGDSLLEPFWPMGTGIARGFLAAMDSAWMVRSWSLGTSPLEVLAERESIYRLLPQTTPENVSKNFSQYSIDPVTRYPNINVNFLRPSQVRHLYDTGETKDIHLEMESLVNSRTTPKLTRNESVARSSKLLGWCQRQTDGYAGVNVTDLTMSWKSGLALCAIIHRYRPDLIDFDSLDEQNVEKNNQLAFDIAEKELGISPIMTGKEMASVGEPDKLSMVMYLTQFYEMFKDSLPSSDTLDLNAEEKAVLIASTRSPISFLSKLGQTISRKRSPKDKKEKDLDGAGKRRKTSQSEEEEAPRGHRGERPTLVSTLTDRRMDVAVGNQNKVKYMATQLLAKFEENAPAQSIGIRRQGSMKKEFPQNLGGSDTCYFCQKRVYVMERLSAEGKFFHRSCFKCEYCATTLRLSAYAYDIEDGKFYCKPHYCYRLSGYAQRKRPAVAPLSGKEAKGPLQDGATTDANGRANAVASSTERTPGSGVNGLEEPSIAKRLRGTPERIELENYRLSLRQAEALQEVPEETQAEHNLSSVLDTGAEEDVASRDWVSPWLPRMVSNSWAQMIHPPQPPTVLGSQM

SEQ ID NO: 10979 - DNA, 5109 bp, Homo sapiens
cagcgcgcgctcctgcagccccggcggagtcccggcggggagcgcccgcgtaggcaggcacccggggcagccctccgtcctcgccgcgcggcctgagaacccctgggccctgggcgagggggctgggctgtgcagcccccgaggctaactgggcgggatcgcagctgcaggggttgtgcgagcagccacggcggcacctgtgccctgcgggcacccaccctgcccctgccgaggcaggcgcccaccgccggcggtgatgcggctgtgaagccctagtcgattaacgtgacagtgtcaggtggacccacagccatcccacctccccctctggggagtgctgagagtgaggcagcatggaggagaggaagcatgagaccatgaacccagctcatgtcctctttgaccggtttgtccaggccaccacctgcaagggaaccctcaaggctttccaggagctctgtgaccacctggaactaaagccaaaggactaccgctccttctatcacaagctcaagtccaagcttaactactggaaagccaaagccctctgggcaaaattggacaaacggggcagtcacaaagactacaaaaagggaaaagcgtgcactaacaccaagtgtctcatcattggggctggcccctgtggtctccgtacagccatcgacttatccttactgggggccaaggtggttgttattgagaaacgagatgccttctcccgcaacaacgtcttgcatctctggccattcaccatacatgatctacgaggtctgggtgccaagaagttctatggcaagttctgtgctggagccatcgaccatatcagtatccgtcagctccaactaatacttttgaaagtagccttgatcctaggcattgaaatccacgtcaatgtggaattccaaggacttatacagcctcctgaggaccaagagaatgaacggataggctggcgggcactggtgcaccccaagactcatcctgtgtcagagtatgaatttgaagtgatcatcggtggggatggtcggaggaacaccttggaagggtttcgtcggaaagaattccgtggcaaactggccatcgccatcacggcaaattttatcaaccgaaatacaacagcagaagctaaagtggaagagatcagtggtgtggcttttatattcaaccaaaaatttttccaggaactgagggaagccacaggtattgacttggagaacatcgtttactacaaagatgacacacactatttcgttatgacagccaaaaagcagagtttgctggacaaaggagtgatactacatgactacgccgacacagagctcctgctttcccgagaaaacgtggaccaggaggctctgctcagctatgccagggaggcggcagacttctctacccagcagcagctgccgtctctggattttgccatcaatcactatgggcagcccgatgtggccatgtttgacttcacttgtatgtatgcctccgagaacgccgccttggtgcgggagcagaacggacaccagttactagtggctctggtcggggacagcctcctagagcctttctggccaatgggaacaggaatagcccggggctttctagctgctatggactctgcctggatggtccgaagttggtctctaggaacgagccctttggaagtgctggcagagagggaaagtatttacaggttgctgcctcagaccacccctgagaatgtgagtaagaacttcagccagtacagtatcgaccctgtcactcggtatcccaatatcaacgtcaacttcctccggccaagccaggtgcgccatttatatgatactggcgaaacaaaagatattcacctggaaatggagagcctggtgaattcccgaaccacccccaaattgactcgcaatgagtctgtagctcgttcaagcaaactgctgggttggtgccagaggcagacagatggctatgcaggggtaaacgtgacagatctcaccatgtcctggaaaagtggcttggccctttgtgcaattatccatagataccgccctgacctgatagattttgattctttggatgagcaaaatgtggagaagaataaccaactggcctttgacattgctgagaaggaattgggcatttctcccatcatgacaggcaaagaaatggcctccgtgggggagcctgataagctgtccatggtgatgtacctgactcagttctacgagatgtttaaggactccctcccctctagcgacaccttggacctaaatgccgaggagaaagcagtcctgatagccagcaccagatcccctatctccttcctaagcaaacttggccagaccatctctcggaagcgttctcccaaggataaaaaggaaaaggacttggatggtgctgggaagaggagaaagaccagtcaatcagaggaggaggaagctcctcggggccacagaggagaaagaccgaccctggtgagcactctgacagacaggaggatggacgttgccgttgggaaccagaacaaagtgaagtacatggcgacccagctgctggccaaatttgaagagaatgcgcccgcacagtccatcggcatacggagacagctgacacaagagcgtggggccagccagccgtcctgctgcctgcctgggcaggttcgccctgcccccaccccccggtggaaacagggctccatgaagaaggagttcccgcagaacctgggaggcagcgacacatgctacttctgccagaagcgggtctacgtgatggagaggctgagtgccgagggcaagttcttccaccggagctgcttcaagtgcgagtactgcgccaccaccctgcgcctctcggcctacgcctacgacatcgaggatggtaaattctactgtaagccacactactgctatcgactctctggctacgcacaaaggaagagaccggcagtggctcccctgtctggaaaggaggccaaaggacccctgcaggatggcgccaccacagatgcaaacggacgggccaacgccgtggccagctccactgagagaaccccaggttcaggcgtgaacggcctggaggagcccagcatcgccaagcgactgaggggcaccccagagcggatcgagctggagaactaccgcctgtccctgaggcaggctgaggcactgcaggaggtaccggaggagactcaggccgagcacaacctgagcagcgtgctggacacgggcgccgaggaggacgtcgccagcaggtcagcacgcagggctgcagggcgcccacccgccacacggccctaagagcctcctcacctctgtgtgtctcggtttcttctcagtgaagggaggcctcctgtctttcctgctgcccgcagtccattctccccagtcccttttaggttcttagcctcatcttctagtcagtgaggactcctccatcagactcaattcagagattcaggaagtatttattccttgaggacctgacatgtccccagctccaagtctgtcattgggaaggaaagtggcaggctctgcccccgggttattcacagattcagcagagggaaggacgggcacacggggagggactctgggtgattcagccaccagtgcaccgggccgtcttgagggaggcctagtccgtcccccaggcatctttttttctcctgtaggtaaagaaagggactgaaaatgtgtgccccaggggccgcatgcagcaccagtggatgcatgcttaggcagttccagagctgtaatcacatccagctgggtgacacctttggggatgtgcatgctataaccctaggactccctatatccactgccctgcaccccagggcttccagtatcagcgaaggcttcaaagtgttcagccgattacagatgatcaagagagccaagaatcaaaagggggtccggtgtcctgtggggcttcaggacagaaacacaggctgcaaacccgaggggcagaggcctcaagtggccttggagagcatttgaatcacacaccttgatttagccatgatgaagggaacatgtggggataaggagagcagagcagtttttttaaggtccaagaacgctttccagaaggtgtttgctgggccgagctgctttcagctgcacccgccacctcagccctcatgtcagacaccctctgcctagattcattcttgggctgcctcacagaccgctcctccgtgcatgccgggggcagcctctgccttggtgtctgcagttccaaagctgtcactgatggtgcatcctcatccagaactctgcttccctatccagagcacccatggaggccccactctccccactgtgcccagatgagggggagcccactctctctctccactgaccctgcagtgagggtgagagatgctgtgtgtcaaaacacatttataaacccttgagcagagctactggcttgaccttgggctgagtgtgggtcagcaccattttctccactgtaatttataaattgtgagaggcagtggggcagcaagttcatgtaatgtagcaaggacattccaggaaggctaacccctggcatttatggcaggtatgacaggagggcagcacagaaaacatgaaatcagtcagcatctatgcaatgcaatacatgcctcatcttactcagattgaagttaaaaaaagattttaaaactagcattcatgctgggcgcagtggctcatgcctgtaatcccagcactttgggaggccaaggtgggcacatcacttaaggtcaggagttcaagaccagcctggccaacataatgaaaccctgtctctactaaaaatacaaaaattagctgggcatggtggtgcacacctgtaatcccagctacttgggagggtaaggcatgagaattgcttgaacctgggaggcggaggttgcagcgagccgagatcatgccactgcaccactgcactccagcctgtgtgacagaatgagactccatctcaaaaaaaattaaaattaaaatcaaaaaataaaataaaggccaggcacggtggctcacacaggagaatcacttgaacctgggaggcggaggttgcagtgatctgagatcacaccagtacactccagcctgggagatggtgagactccgtctc

SEQ ID NO: 10980 - protein, 976 aa, Homo sapiens
MEERKHETMNPAHVLFDRFVQATTCKGTLKAFQELCDHLELKPKDYRSFYHKLKSKLNYWKAKALWAKLDKRGSHKDYKKGKACTNTKCLIIGAGPCGLRTAIDLSLLGAKVVVIEKRDAFSRNNVLHLWPFTIHDLRGLGAKKFYGKFCAGAIDHISIRQLQLILLKVALILGIEIHVNVEFQGLIQPPEDQENERIGWRALVHPKTHPVSEYEFEVIIGGDGRRNTLEGFRRKEFRGKLAIAITANFINRNTTAEAKVEEISGVAFIFNQKFFQELREATGIDLENIVYYKDDTHYFVMTAKKQSLLDKGVILHDYADTELLLSRENVDQEALLSYAREAADFSTQQQLPSLDFAINHYGQPDVAMFDFTCMYASENAALVREQNGHQLLVALVGDSLLEPFWPMGTGIARGFLAAMDSAWMVRSWSLGTSPLEVLAERESIYRLLPQTTPENVSKNFSQYSIDPVTRYPNINVNFLRPSQVRHLYDTGETKDIHLEMESLVNSRTTPKLTRNESVARSSKLLGWCQRQTDGYAGVNVTDLTMSWKSGLALCAIIHRYRPDLIDFDSLDEQNVEKNNQLAFDIAEKELGISPIMTGKEMASVGEPDKLSMVMYLTQFYEMFKDSLPSSDTLDLNAEEKAVLIASTRSPISFLSKLGQTISRKRSPKDKKEKDLDGAGKRRKTSQSEEEEAPRGHRGERPTLVSTLTDRRMDVAVGNQNKVKYMATQLLAKFEENAPAQSIGIRRQLTQERGASQPSCCLPGQVRPAPTPRWKQGSMKKEFPQNLGGSDTCYFCQKRVYVMERLSAEGKFFHRSCFKCEYCATTLRLSAYAYDIEDGKFYCKPHYCYRLSGYAQRKRPAVAPLSGKEAKGPLQDGATTDANGRANAVASSTERTPGSGVNGLEEPSIAKRLRGTPERIELENYRLSLRQAEALQEVPEETQAEHNLSSVLDTGAEEDVASRSARRAAGRPPATRP

SEQ ID NO: 10981 - DNA, 5025 bp, Homo sapiens
cagcgcgcgctcctgcagccccggcggagtcccggcggggagcgcccgcgtaggcaggcacccggggcagccctccgtcctcgccgcgcggcctgagaacccctgggccctgggcgagggggctgggctgtgcagcccccgaggctaactgggcgggatcgcagctgcaggggttgtgcgagcagccacggcggcacctgtgccctgcgggcacccaccctgcccctgccgaggcaggcgcccaccgccggcggtgatgcggctgtgaagccctagtcgattaacgtgacagtgtcaggtggacccacagccatcccacctccccctctggggagtgctgagagtgaggcagcatggaggagaggaagcatgagaccatgaacccagctcatgtcctctttgaccggtttgtccaggccaccacctgcaagggaaccctcaaggctttccaggagctctgtgaccacctggaactaaagccaaaggactaccgctccttctatcacaagctcaagtccaagcttaactactggaaagccaaagccctctgggcaaaattggacaaacggggcagtcacaaagactacaaaaagggaaaagcgtgcactaacaccaagtgtctcatcattggggctggcccctgtggtctccgtacagccatcgacttatccttactgggggccaaggtggttgttattgagaaacgagatgccttctcccgcaacaacgtcttgcatctctggccattcaccatacatgatctacgaggtctgggtgccaagaagttctatggcaagttctgtgctggagccatcgaccatatcagtatccgtcagctccaactaatacttttgaaagtagccttgatcctaggcattgaaatccacgtcaatgtggaattccaaggacttatacagcctcctgaggaccaagagaatgaacggataggctggcgggcactggtgcaccccaagactcatcctgtgtcagagtatgaatttgaagtgatcatcggtggggatggtcggaggaacaccttggaagggtttcgtcggaaagaattccgtggcaaactggccatcgccatcacggcaaattttatcaaccgaaatacaacagcagaagctaaagtggaagagatcagtggtgtggcttttatattcaaccaaaaatttttccaggaactgagggaagccacaggtattgacttggagaacatcgtttactacaaagatgacacacactatttcgttatgacagccaaaaagcagagtttgctggacaaaggagtgatactacatgactacgccgacacagagctcctgctttcccgagaaaacgtggaccaggaggctctgctcagctatgccagggaggcggcagacttctctacccagcagcagctgccgtctctggattttgccatcaatcactatgggcagcccgatgtggccatgtttgacttcacttgtatgtatgcctccgagaacgccgccttggtgcgggagcagaacggacaccagttactagtggctctggtcggggacagcctcctagagcctttctggccaatgggaacaggaatagcccggggctttctagctgctatggactctgcctggatggtccgaagttggtctctaggaacgagccctttggaagtgctggcagagagggaaagtatttacaggttgctgcctcagaccacccctgagaatgtgagtaagaacttcagccagtacagtatcgaccctgtcactcggtatcccaatatcaacgtcaacttcctccggccaagccaggtgcgccatttatatgatactggcgaaacaaaagatattcacctggaaatggagagcctggtgaattcccgaaccacccccaaattgactcgcaatgagtctgtagctcgttcaagcaaactgctgggttggtgccagaggcagacagatggctatgcaggggtaaacgtgacagatctcaccatgtcctggaaaagtggcttggccctttgtgcaattatccatagataccgccctgacctgatagattttgattctttggatgagcaaaatgtggagaagaataaccaactggcctttgacattgctgagaaggaattgggcatttctcccatcatgacaggcaaagaaatggcctccgtgggggagcctgataagctgtccatggtgatgtacctgactcagttctacgagatgtttaaggactccctcccctctagcgacaccttggacctaaatgccgaggagaaagcagtcctgatagccagcaccagatcccctatctccttcctaagcaaacttggccagaccatctctcggaagcgttctcccaaggataaaaaggaaaaggacttggatggtgctgggaagaggagaaagaccagtcaatcagaggaggaggaagctcctcggggccacagaggagaaagaccgaccctggtgagcactctgacagacaggaggatggacgttgccgttgggaaccagaacaaagtgaagtacatggcgacccagctgctggccaaatttgaagagaatgcgcccgcacagtccatcggcatacggagacagggctccatgaagaaggagttcccgcagaacctgggaggcagcgacacatgctacttctgccagaagcgggtctacgtgatggagaggctgagtgccgagggcaagttcttccaccggagctgcttcaagtgcgagtactgcgccaccaccctgcgcctctcggcctacgcctacgacatcgaggatggtaaattctactgtaagccacactactgctatcgactctctggctacgcacaaaggaagagaccggcagtggctcccctgtctggaaaggaggccaaaggacccctgcaggatggcgccaccacagatgcaaacggacgggccaacgccgtggccagctccactgagagaaccccaggttcaggcgtgaacggcctggaggagcccagcatcgccaagcgactgaggggcaccccagagcggatcgagctggagaactaccgcctgtccctgaggcaggctgaggcactgcaggaggtaccggaggagactcaggccgagcacaacctgagcagcgtgctggacacgggcgccgaggaggacgtcgccagcaggtcagcacgcagggctgcagggcgcccacccgccacacggccctaagagcctcctcacctctgtgtgtctcggtttcttctcagtgaagggaggcctcctgtctttcctgctgcccgcagtccattctccccagtcccttttaggttcttagcctcatcttctagtcagtgaggactcctccatcagactcaattcagagattcaggaagtatttattccttgaggacctgacatgtccccagctccaagtctgtcattgggaaggaaagtggcaggctctgcccccgggttattcacagattcagcagagggaaggacgggcacacggggagggactctgggtgattcagccaccagtgcaccgggccgtcttgagggaggcctagtccgtcccccaggcatctttttttctcctgtaggtaaagaaagggactgaaaatgtgtgccccaggggccgcatgcagcaccagtggatgcatgcttaggcagttccagagctgtaatcacatccagctgggtgacacctttggggatgtgcatgctataaccctaggactccctatatccactgccctgcaccccagggcttccagtatcagcgaaggcttcaaagtgttcagccgattacagatgatcaagagagccaagaatcaaaagggggtccggtgtcctgtggggcttcaggacagaaacacaggctgcaaacccgaggggcagaggcctcaagtggccttggagagcatttgaatcacacaccttgatttagccatgatgaagggaacatgtggggataaggagagcagagcagtttttttaaggtccaagaacgctttccagaaggtgtttgctgggccgagctgctttcagctgcacccgccacctcagccctcatgtcagacaccctctgcctagattcattcttgggctgcctcacagaccgctcctccgtgcatgccgggggcagcctctgccttggtgtctgcagttccaaagctgtcactgatggtgcatcctcatccagaactctgcttccctatccagagcacccatggaggccccactctccccactgtgcccagatgagggggagcccactctctctctccactgaccctgcagtgagggtgagagatgctgtgtgtcaaaacacatttataaacccttgagcagagctactggcttgaccttgggctgagtgtgggtcagcaccattttctccactgtaatttataaattgtgagaggcagtggggcagcaagttcatgtaatgtagcaaggacattccaggaaggctaacccctggcatttatggcaggtatgacaggagggcagcacagaaaacatgaaatcagtcagcatctatgcaatgcaatacatgcctcatcttactcagattgaagttaaaaaaagattttaaaactagcattcatgctgggcgcagtggctcatgcctgtaatcccagcactttgggaggccaaggtgggcacatcacttaaggtcaggagttcaagaccagcctggccaacataatgaaaccctgtctctactaaaaatacaaaaattagctgggcatggtggtgcacacctgtaatcccagctacttgggagggtaaggcatgagaattgcttgaacctgggaggcggaggttgcagcgagccgagatcatgccactgcaccactgcactccagcctgtgtgacagaatgagactccatctcaaaaaaaattaaaattaaaatcaaaaaataaaataaaggccaggcacggtggctcacacaggagaatcacttgaacctgggaggcggaggttgcagtgatctgagatcacaccagtacactccagcctgggagatggtgagactccgtctc

SEQ ID NO: 10982 - protein, 948 aa, Homo sapiens
MEERKHETMNPAHVLFDRFVQATTCKGTLKAFQELCDHLELKPKDYRSFYHKLKSKLNYWKAKALWAKLDKRGSHKDYKKGKACTNTKCLIIGAGPCGLRTAIDLSLLGAKVVVIEKRDAFSRNNVLHLWPFTIHDLRGLGAKKFYGKFCAGAIDHISIRQLQLILLKVALILGIEIHVNVEFQGLIQPPEDQENERIGWRALVHPKTHPVSEYEFEVIIGGDGRRNTLEGFRRKEFRGKLAIAITANFINRNTTAEAKVEEISGVAFIFNQKFFQELREATGIDLENIVYYKDDTHYFVMTAKKQSLLDKGVILHDYADTELLLSRENVDQEALLSYAREAADFSTQQQLPSLDFAINHYGQPDVAMFDFTCMYASENAALVREQNGHQLLVALVGDSLLEPFWPMGTGIARGFLAAMDSAWMVRSWSLGTSPLEVLAERESIYRLLPQTTPENVSKNFSQYSIDPVTRYPNINVNFLRPSQVRHLYDTGETKDIHLEMESLVNSRTTPKLTRNESVARSSKLLGWCQRQTDGYAGVNVTDLTMSWKSGLALCAIIHRYRPDLIDFDSLDEQNVEKNNQLAFDIAEKELGISPIMTGKEMASVGEPDKLSMVMYLTQFYEMFKDSLPSSDTLDLNAEEKAVLIASTRSPISFLSKLGQTISRKRSPKDKKEKDLDGAGKRRKTSQSEEEEAPRGHRGERPTLVSTLTDRRMDVAVGNQNKVKYMATQLLAKFEENAPAQSIGIRRQGSMKKEFPQNLGGSDTCYFCQKRVYVMERLSAEGKFFHRSCFKCEYCATTLRLSAYAYDIEDGKFYCKPHYCYRLSGYAQRKRPAVAPLSGKEAKGPLQDGATTDANGRANAVASSTERTPGSGVNGLEEPSIAKRLRGTPERIELENYRLSLRQAEALQEVPEETQAEHNLSSVLDTGAEEDVASRSARRAAGRPPATRP

SEQ ID NO: 10983 - DNA, 2478 bp, Homo sapiens
atgacacatgtacacagaaaaatacaagaaaacacatacatcaaaatggtaacaatgatatgctggtgaacgtaatgggtatttttattttttgtactttatttaaaaaattcttttacaatgaacatgtattacttttgaactcaggtgatctgcccttctcgacctcccaaactgctgagattagaggcatgagccaccgtcaccagcccagaaaatattttttaaattgaaaataagatagcatattccacaaatcttctaccggctccattgcggattgaattagatgattctccctattgtttactaagtgtccagttatttctgggcactctccacctccgcaggacactgcccatctccccaacccagggccatttctcaacctagtgctccttctcctactaggggggcagacttcccaacgtgagcacctacatttcgccgtagatgggatccacttgcactctctgaggttctcaggcagattccttccttacggaagggggtctgatatttaatcaccccatgcactaagtacacacttcatgtgcggatccatcaggataaccccacacaagctgccagttctttgcttgtagtgggtgcccaataaatgtttgaatgcataaagaaagcactcagataagcagagacattttagagctctctggggatgagaaaagagagagctatgggagtgagaattaacttgattgactatggctggacctggcaaagaacaactcagaagtattggcctcacaatcaccttgttcaggctgcttaatcaatattaaaagtttgctgctcccacacaattttgctaggctctccaaccctgtgaggatgtcaacagttgaaaaagaagaaataatgagcccagcctgtatttgcaggggagtgttaaaactgccggtggagcaggatagtttgctaaacagccagttgagaactttcccaaactggtcggcagcagcattgcacacagaagtcccttcttcattgacatggggctaattctagccaccagcactccagcggtacggggcagttttgtggccttttgctattgaatctgccagatgtgtccaagacacactctcatgggcagaatataaacaacaaaccagtataaagaagtccacagtgatctcacccttcatagaagtcttctttgacttgttttctggccccctgtaagcactccttgtaccacactccctaaaccctgtggcttaggttttgctattttgtatttgtttcctccttctctggttgttacatgtaaaaaggttgtgttcacgcagggggcaggaattgcaatggaaagaatgcagtgtggaaagccaggctcagttacttaccagccttgctaccttagccaaacggtcatgctctctgagctgtagtttccttcctcatctgtgaatagacttctaccaactctcctcacatgactgttttgagactgaaatgatattataggtatagaaataaatgtaaacataatataaatgtatgaggcctggcgtagtggctcacgcctgtaaccccagcactttaggaagtcgaggcaggtggatcacctgaggtcaggagttcgagaccagcctggccaagatagcgaaacccccatctctactaaaaatataaaaattagccaagcgtggtggcacgagcctgtaatctcagctacttgggaggctgaggcatgagaatcgcttgaaatcaggaggcagaggttgcagtgagccgagattgcgccactgtactccagcctgggtgacagagtgtgactctgcctcaaaaaaaataaaaaaaaacaaaataaaaataaaaataaataagtaaatatatgagattatctttcatctggcatgcagtagattcttaagaaactcaagacagtattgcgttgtggagttatggtgggggcactagatgtcagacctctgtgtgcactcgggcagatcagtttcactaagctcttgtgttttcctcaggaaggcaaaacggtactaaggcgaataataaggaacatcacagaattgatatgagggtgaagttaaataatgcgggcaaagcacttcccaacagtacctagcacatagtgagcacttaataaatgtaagctgtggctgctgctgctgtggccatcagggagatagggaaatatgtcaataagaaatgtatattggccgggcacggcggctcatgcctataatcccagcactttgggaggccgaggcgggtggatcacctgaggttgggatttcaagaccagcctgaccaacatggagaaaccccgtccctactaaaaatacaaaattagctgggcgtgttggcgcatgcctgtaatcccagctactcgggaggctgaggcaggagaatcgcttgaacccaggaggcggagtttgtggtgagccgagatcatgcactccagcctgggcaacaagaacgaaactcagtctc

SEQ ID NO: 10984 - protein, 57 aa, Homo sapiens [sequence omitted]

SEQ ID NO: 10985 - DNA, 2616 bp, Homo sapiens
acgtgacggcccaggcccccgccccgccggctcctctcgcccagcctcccgcctcgcgcctcccgcctcccgcctcccgcctccctccagctgcgagtgcggcctcggctggcggcggcaccaggccacagttgtaagggatcttgtggctgtcaggatggcagaggagcaggagttcacccagctctgcaagttgcctgcacagccctcacacccacactgcgtgaacaacacctaccgcagcgcacagcactcccaggctctgctccgagggctgctggctctccgggacagcggaatcctcttcgatgttgtgctggtggtggagggcagacacatcgaggcccatcgcatcctgctggctgcgtcctgcgattacttcagaggaatgtttgctgggggattgaaggagatggaacaggaagaggtcctgatccacggtgtgtcctacaatgctatgtgccaaatcctacatttcatatacacctccgagctggagctcagcctgagcaatgtacaagagacactggtggctgcctgccagcttcagatcccagaaattatccatttctgctgtgatttcctcatgtcctgggtggacgaagagaacattctcgatgtctaccggctggcagagctgtttgacttgagccgcctgactgagcaactggacacctatatcctcaaaaactttgtggccttctctcggactgacaagtaccgccagcttccattggagaaggtctactccctcctcagcagcaatcgcctggaggtctcctgcgagaccgaggtatatgagggggcccttctctaccattatagcctggagcaggtgcaggctgaccagatctcgctgcacgagcccccaaagctccttgagacagtgcggtttccgctgatggaagctgaggtcctgcagcggctgcatgacaagctggaccccagccctttgagggacacagtggccagcgccctcatgtaccaccggaacgagagcctacagcccagcctgcagagcccgcaaacggagctgcggtcggacttccagtgcgttgtgggcttcgggggcattcactccacgccgtccactgtcctcagcgaccaggccaagtatctaaaccccttactgggagagtggaagcacttcactgcctccctggccccccgcatgtccaaccagggcatcgcggtgctcaacaacttcgtatacttgattggaggggacaacaatgtccaaggatttcgagcagagtcccgatgctggaggtatgacccacggcacaaccgctggttccagatccagtccctgcagcaggagcacgccgacctgtccgtgtgtgttgtaggcaggtacatctacgctgtggcgggccgtgactaccacaatgacctgaatgctgtggagcgctacgaccctgccaccaactcctgggcatacgtggccccactcaagagggaggtgtatgcccacgcaggcgcgacgctggaggggaagatgtatatcacctgcggccgcagaggggaggattacctgaaagagacacactgctacgatccaggcagcaacacttggcacacactggctgatgggcctgtgcggcgcgcctggcacggcatggcaaccctcctcaacaagctgtatgtgatcgggggcagcaacaacgatgccggatacaggagggacgtgcaccaggtggcctgctacagctgcacgtctggacagtggtcatctgtctgcccactccctgctgggcacggtgagcctggcattgctgtgctggacaacaggatctatgtgttaggtggccgctcacacaaccgcggcagccgcacaggctacgtgcacatttacgatgtggagaaggactgctgggaggaagggccccagctggacaactccatctcaggcctggcggcctgtgtgctcaccctgccccgctccctgctccttgagccgccccgcgggacccctgaccgcagccaggccgacccggactttgcctctgaggtgatgagtgtgtctgactgggaggagtttgacaactccagtgaggactaggctccctgtgcctggcatcagagggaagggaggctggggctgcagggcagtgaaacccacgcagcctaggccagagcactttactccaggcagggcccctgcccctgttggccacagcttatgggccctgccctctttcttcacaccagccccttggccagcctgccgcaggcatctcagggccatgcagatcccaggctgtggattacgtcactgcaggaactgcttctgaaaggctttggccttcctcagtgagccctggaggggttggccttctctcctccctgcctagatcagtccttctccaaaaggacctgggagctggcagcctgggcaggggggctgaggcacgtggtagccctctttctgtgaatggggtggggctgtgggggcagctggggttggaggatgagagctcctgaggggcagaggagcagagatgcatcagctcgcctgggactggctctgtgataaaaagacccctcccgctgggttttcagaccccatgttgttggtcaatgaaataaagcatcttacagaaggtgttaactgtt

SEQ ID NO: 10986 - protein, 634 aa, Homo sapiens; identical to SEQ ID NO: 1702

SEQ ID NO: 10987 - DNA, 1817 bp, Homo sapiens
acgtgacggcccaggcccccgccccgccggctcctctcgcccagcctcccgcctcgcgcctcccgcctcccgcctcccgcctccctccagctgcgagtgcggcctcggctggcggcggcaccaggccacagttgtaagggatcttgtggctgtcaggatggcagaggagcaggagttcacccagctctgcaagttgcctgcacagccctcacacccacactgcgtgaacaacacctaccgcagcgcacagcactcccaggctctgctccgagggctgctggctctccgggacagcggaatcctcttcgatgttgtgctggtggtggagggcagacacatcgaggcccatcgcatcctgctggctgcgtcctgcgattacttcagaggaatgtttgctgggggattgaaggagatggaacaggaagaggtcctgatccacggtgtgtcctacaatgctatgtgccaaatcctacatttcatatacacctccgagctggagctcagcctgagcaatgtacaagagacactggtggctgcctgccagcttcagatcccagaaattatccatttctgctgtgatttcctcatgtcctgggtggacgaagagaacattctcgatgtctaccggctggcagagctgtttgacttgagccgcctgactgagcaactggacacctatatcctcaaaaactttgtggccttctctcggactgacaagtaccgccagcttccattggagaaggtctactccctcctcagcagcaatcgcctggaggtctcctgcgagaccgaggtatatgagggggcccttctctaccattatagcctggagcaggtgcaggctgaccagatctcgctgcacgagcccccaaagctccttgagacagtgcggtttccgctgatggaagctgaggtcctgcagcggctgcatgacaagctggaccccagccctttgagggacacagtggccagcgccctcatgtaccaccggaacgagagcctacagcccagcctgcagagcccgcaaacggagctgcggtcggacttccagtgcgttgtgggcttcgggggcattcactccacgccgtccactgtcctcagcgaccaggccaagtatctaaaccccttactgggagagtggaagcacttcactgcctccctggccccccgcatgtccaaccagggcatcgcggtgctcaacaacttcgtatacttgattggaggggacaacaatgtccaaggatttcgagcagagtcccgatgctggaggtatgacccacggcacaaccgctggttccagatccagtccctgcagcaggagcacgccgacctgtccgtgtgtgttgtaggcaggtacatctacgctgtggcgggccgtgactaccacaatgacctgaatgctgtggagcgctacgaccctgccaccaactcctgggcatacgtggccccactcaagagggaggtgtatgcccacgcaggcgcgacgctggaggggaagatgtatatcacctgcggccgcagaggggaggattacctgaaagagacacactgctacgatccaggcagcaacacttggcacacactggctgatgggcctgtgcggcgcgcctggcacggcatggcaaccctcctcaacaagctgtatgtgatcgggggcactggggttggaggatgagagctcctgaggggcagaggagcagagatgcatcagctcgcctgggactggctctgtgataaaaagacccctcccgctgggttttcagaccccatgttgttggtcaatgaaataaagcatcttacagaaggtgttaactgtt

SEQ ID NO: 10988 - protein, 505 aa, Homo sapiens
MAEEQEFTQLCKLPAQPSHPHCVNNTYRSAQHSQALLRGLLALRDSGILFDVVLVVEGRHIEAHRILLAASCDYFRGMFAGGLKEMEQEEVLIHGVSYNAMCQILHFIYTSELELSLSNVQETLVAACQLQIPEIIHFCCDFLMSWVDEENILDVYRLAELFDLSRLTEQLDTYILKNFVAFSRTDKYRQLPLEKVYSLLSSNRLEVSCETEVYEGALLYHYSLEQVQADQISLHEPPKLLETVRFPLMEAEVLQRLHDKLDPSPLRDTVASALMYHRNESLQPSLQSPQTELRSDFQCVVGFGGIHSTPSTVLSDQAKYLNPLLGEWKHFTASLAPRMSNQGIAVLNNFVYLIGGDNNVQGFRAESRCWRYDPRHNRWFQIQSLQQEHADLSVCVVGRYIYAVAGRDYHNDLNAVERYDPATNSWAYVAPLKREVYAHAGATLEGKMYITCGRRGEDYLKETHCYDPGSNTWHTLADGPVRRAWHGMATLLNKLYVIGGTGVGG

SEQ ID NO: 10989 - DNA, 686 bp, Homo sapiens
atcccagaaattatccatttctgctgtgatttcctcatgtcctgggtggacgaagagaacattctcgatgtctaccggctggcagagctgtttgacttgagccgcctgactgagcaactggacacctatatcctcaaaaactttgtggccttctctcggactgacaagtaccgccagcttccattggagaaggtctactccctcctcagcagcaatcgcctggaggtctcctgcgagaccgaggtatgacccacggcacaaccgctggttccagatccagtccctgcagcaggagcacgccgacctgtccgtgtgtgttgtaggcaggtacatctacgctgtggcgggccgtgactaccacaatgacctgaatgctgtggagcgctacgaccctgccaccaactcctgggcatacgtggccccactcaagagggagctggggaagcagcagttctccagcttggccacagaggggcagccttggctttcaaccagctgcatcgtggctgccggtgttccttcatgcacgcattcattccgcaactactaagcaccatgtaccaagtcctgggaatccagtggtgacaagaaatgagaaagactccccactccatggtgtttacagccttgtaggagaaaccactcttaaccagaaaacagatcagtaaagtggttacaattatggt

SEQ ID NO: 10990 - protein, 98 aa, Homo sapiens
MLWSATTLPPTPGHTWPHSRGSWGSSSSPAWPQRGSLGFQPAASWLPVFLHARIHSATTKHHVPSPGNPVVTRNEKDSPLHGVYSLVGETTLNQKTDQ

SEQ ID NO: 10991 - DNA, 1048 bp, Homo sapiens
agtgcggcctcggctggcggcggcaccagaggaatgtttgctgggggattgaaggagatggaacaggaagaggtcctgatccacggtgtgtcctacaatgctatgtgccaaatcctacatttcatatacacctccgagctggagctcagcctgagcaatgtacaagagacactggtggctgcctgccagcttcagatcccagaaattatccatttctgctgtgatttcctcatcagcaatcgcctggaggtctcctgcgagaccgaggtatatgagggggcccttctctaccattatagcctggagcaggtgcaggctgaccagatctcgctgcacgagcccccaaagctccttgagacagtgcggtttccgctgatggaagctgaggtcctgcagcggctgcatgacaagctggaccccagccctttgagggacacagtggccagcgccctcatgtaccaccggaacgagagcctacagcccagcctgcagagcccgcaaacggagctgcggtcggacttccagtgcgttgtgggcttcgggggcattcactccacgccgtccactgtcctcagcgaccaggccaagtatctaaaccccttactgggagagtggaagcacttcactgcctccctggccccccgcatgtccaaccagggcatcgcggtgctcaacaacttcgtatacttgattggaggggacaacaatgtccaaggatttcgagcagagtcccgatgctggaggtaggacagggtgctagctggtccctttgtcttcaggtgatgagagggtgtggaagtcatgggctgagagagctggtcaggttccccccagcctttcacatgagcatcacttgccattgtggaatgaagtctaggtgaattcagagaaggtggacagcagtgagataagagaaggggacatgtggatcgccttctttcctgcatgtcccctactcctcagaaacccacttaccctggacccttgctcagcctctttggggtaggctaggttgcgagtgcattgtgcaggaggagacgggagggga

SEQ ID NO: 10992 - protein, 237 aa, Homo sapiens
MFAGGLKEMEQEEVLIHGVSYNAMCQILHFIYTSELELSLSNVQETLVAACQLQIPEIIHFCCDFLISNRLEVSCETEVYEGALLYHYSLEQVQADQISLHEPPKLLETVRFPLMEAEVLQRLHDKLDPSPLRDTVASALMYHRNESLQPSLQSPQTELRSDFQCVVGFGGIHSTPSTVLSDQAKYLNPLLGEWKHFTASLAPRMSNQGIAVLNNFVYLIGGDNNVQGFRAESRCWR

SEQ ID NO: 10993 - DNA, 1574 bp, Homo sapiens
acgtgacggcccaggcccccgccccgccggctcctctcgcccagcctcccgcctcgcgcctcccgcctcccgcctcccgcctccctccagctgcgagtgcggcctcggctggcggcggcaccaggccacagttgtaagggatcttgtggctgtcaggatggcagaggagcaggagttcacccagctctgcaagttgcctgcacagccctcacacccacactgcgtgaacaacacctaccgcagcgcacagcactcccaggctctgctccgagggctgctggctctccgggacagcggaatcctcttcgatgttgtgctggtggtggagggcagacacatcgaggcccatcgcatcctgctggctgcgtcctgcgattacttcagaggaatgtttgctgggggattgaaggagatggaacaggaagaggtcctgatccacggtgtgtcctacaatgctatgtgccaaatcctacatttcatatacacctccgagctggagctcagcctgagcaatgtacaagagacactggtggctgcctgccagcttcagatcccagaaattatccatttctgctgtgatttcctcatgtcctgggtggacgaagagaacattctcgatgtctaccggctggcagagctgtttgacttgagccgcctgactgagcaactggacacctatatcctcaaaaactttgtggccttctctcggactgacaagtaccgccagcttccattggagaaggtctactccctcctcagcagcaatcgcctggaggtctcctgcgagaccgaggtatatgagggggcccttctctaccattatagcctggagcaggtgcaggctgaccagatctcgctgcacgagcccccaaagctccttgagacagtgcggtttccgctgatggaagctgaggtcctgcagcggctgcatgacaagctggaccccagccctttgagggacacagtggccagcgccctcatgtaccaccggaacgagagcctacagcccagcctgcagagcccgcaaacggagctgcggtcggacttccagtgcgttgtgggcttcgggggcattcactccacgccgtccactgtcctcagcgaccaggccaagtatctaaaccccttactgggagagtggaagcacttcactgcctccctggccccccgcatgtccaaccagggcatcgcggtgctcaacaacttcgtatacttgattggaggggacaacaatgtccaaggatttcgagcagagtcccgatgctggaggtaggacagggtgctagctggtccctttgtcttcaggtgatgagagggtgtggaagtcatgggctgagagagctggtcaggttccccccagcctttcacatgagcatcacttgccattgtggaatgaagtctaggtgaattcagagaaggtggacagcagtgagataagagaaggggacatgtggatcgccttctttcctgcatgtcccctactcctcagaaacccacttaccctggacccttgctcagcctctttggggtaggctaggttgcgagtgcattgtgcaggaggagacgggagggga

SEQ ID NO: 10994 - protein, 371 aa, Homo sapiens
MAEEQEFTQLCKLPAQPSHPHCVNNTYRSAQHSQALLRGLLALRDSGILFDVVLVVEGRHIEAHRILLAASCDYFRGMFAGGLKEMEQEEVLIHGVSYNAMCQILHFIYTSELELSLSNVQETLVAACQLQIPEIIHFCCDFLMSWVDEENILDVYRLAELFDLSRLTEQLDTYILKNFVAFSRTDKYRQLPLEKVYSLLSSNRLEVSCETEVYEGALLYHYSLEQVQADQISLHEPPKLLETVRFPLMEAEVLQRLHDKLDPSPLRDTVASALMYHRNESLQPSLQSPQTELRSDFQCVVGFGGIHSTPSTVLSDQAKYLNPLLGEWKHFTASLAPRMSNQGIAVLNNFVYLIGGDNNVQGFRAESRCWR

SEQ ID NO: 10995 - DNA, 1621 bp, Homo sapiens
acgtgacggcccaggcccccgccccgccggctcctctcgcccagcctcccgcctcgcgcctcccgcctcccgcctcccgcctccctccagctgcgagtgcggcctcggctggcggcggcaccaggccacagttgtaagggatcttgtggctgtcaggatggcagaggagcaggagttcacccagctctgcaagttgcctgcacagccctcacacccacactgcgtgaacaacacctaccgcagcgcacagcactcccaggctctgctccgagggctgctggctctccgggacagcggaatcctcttcgatgttgtgctggtggtggagggcagacacatcgaggcccatcgcatcctgctggctgcgtcctgcgattacttcagaggaatgtttgctgggggattgaaggagatggaacaggaagaggtcctgatccacggtgtgtcctacaatgctatgtgccaaatcctacatttcatatacacctccgagctggagctcagcctgagcaatgtacaagagacactggtggctgcctgccagcttcagatgctgttcaccagcccaggcttgaatgggtgtcattctctctgcagatcccagaaattatccatttctgctgtgatttcctcatgtcctgggtggacgaagagaacattctcgatgtctaccggctggcagagctgtttgacttgagccgcctgactgagcaactggacacctatatcctcaaaaactttgtggccttctctcggactgacaagtaccgccagcttccattggagaaggtctactccctcctcagcagcaatcgcctggaggtctcctgcgagaccgaggtatatgagggggcccttctctaccattatagcctggagcaggtgcaggctgaccagatctcgctgcacgagcccccaaagctccttgagacagtgcggtttccgctgatggaagctgaggtcctgcagcggctgcatgacaagctggaccccagccctttgagggacacagtggccagcgccctcatgtaccaccggaacgagagcctacagcccagcctgcagagcccgcaaacggagctgcggtcggacttccagtgcgttgtgggcttcgggggcattcactccacgccgtccactgtcctcagcgaccaggccaagtatctaaaccccttactgggagagtggaagcacttcactgcctccctggccccccgcatgtccaaccagggcatcgcggtgctcaacaacttcgtatacttgattggaggggacaacaatgtccaaggatttcgagcagagtcccgatgctggaggtaggacagggtgctagctggtccctttgtcttcaggtgatgagagggtgtggaagtcatgggctgagagagctggtcaggttccccccagcctttcacatgagcatcacttgccattgtggaatgaagtctaggtgaattcagagaaggtggacagcagtgagataagagaaggggacatgtggatcgccttctttcctgcatgtcccctactcctcagaaacccacttaccctggacccttgctcagcctctttggggtaggctaggttgcgagtgcattgtgcaggaggagacgggagggga

SEQ ID NO: 10996 - protein, 179 aa, Homo sapiens
MAEEQEFTQLCKLPAQPSHPHCVNNTYRSAQHSQALLRGLLALRDSGILFDVVLVVEGRHIEAHRILLAASCDYFRGMFAGGLKEMEQEEVLIHGVSYNAMCQILHFIYTSELELSLSNVQETLVAACQLQMLFTSPGLNGCHSLCRSQKLSISAVISSCPGWTKRTFSMSTGWQSCLT

SEQ ID NO: 10997 - DNA, 779 bp, Homo sapiens
cgcctccctccagctgcgagtgcggcctcggctggcggcggcaccaggccacagttgtaagggatcttgtggctgtcaggatggcagaggagcaggagttcacccagctctgcaagttgcctgcacagccctcacacccacactgcgtgaacaacacctaccgcagcgcacagcactcccaggctctgctccgagggctgctggctctccgggacagcggaatcctcttcgatgttgtgctggtggtggagggcagacacatcgaggcccatcgcatcctgctggctgcgtcctgcgattacttcagcatgagcttcaccactcgctctaccttctccaccaactactggtccctgggctctgtccaggctcccagctatggcgcctggctggtcagcagcgtggccagcgtctatgcaggcaccgagggctctggttcctggatcttcgtgtcccgctccaccagcttccagggctgcatggggtctgggggcctggccgcggggatggctggggatctggcaggaatgggaagcatccagaatgagaaggagaccatacaaagcctgaatgaccgcctggcctcctacctggacagagcgaggagcctggagaccgagaaccggaagctggagagcaaaatccagaagcacttggagaagaagggacccagatcagagactggaggcattacttcaagaccatcgaggacctgagggctcagatctttgcaaatactgtggacaacgcccgtatctttctgtagatcgacaatgccc

SEQ ID NO: 10998 - protein, 211 aa, Homo sapiens
MAEEQEFTQLCKLPAQPSHPHCVNNTYRSAQHSQALLRGLLALRDSGILFDVVLVVEGRHIEAHRILLAASCDYFSMSFTTRSTFSTNYWSLGSVQAPSYGAWLVSSVASVYAGTEGSGSWIFVSRSTSFQGCMGSGGLAAGMAGDLAGMGSIQNEKETIQSLNDRLASYLDRARSLETENRKLESKIQKHLEKKGPRSETGGITSRPSRT

SEQ ID NO: 10999 - DNA, 557 bp, Homo sapiens
aggagttacatctggctggtgctaggatggaaggtggggcaggtcaccacctcccagggactgagtgccaaagcaaggaggaagattggaggtgaggctgtatggagacagccacaggctcacagagcttgtgctgagctctctagggggaagcttgatctgcctgggaagcttccagctcctacctcctgcagagcccagaatggtgtccaggaaatatgtggccattgagtggaaccagccttggcatggtagcctgcaggaacccgcaggctagagacatggccacatgagcagtgaggatctcccccgaggagggtctacagtgtcaagagagggcaagtccacttcaggatcaaccttcctgtggccccttactttccttggtccacctttccaggtcacccatccagactgtcaccagggatcactgccctgggcaccaacccaatgcggggacaagtagaaaaagagctctggggaaaataccaaagggaatagtcactcaattttactgtgatgataaactcctggcaaagttccaggcctctctctgt

SEQ ID NO: 11000 - protein, 58 aa, Homo sapiens [sequence omitted]

SEQ ID NO: 11001 - DNA, 3428 bp, Homo sapiens
cccacaagccctccttcacttccggctcggccgaggcactgcggacggcttccgggtttgggcctggctctgtgactgaggcggcggcggtggcggccaagcgggatacgggcggcgggagctggggaacaggcatggacgtttccgggcaagagaccgactggcggagcaccgccttccggcagaagctggtcagtcaaatcgaggatgccatgaggaaagctggtgtggcacacagtaaatccagcaaggatatggagagccatgttttcctgaaggccaagacccgggacgaatacctttctctcgtggccaggctcattatccattttcgagacattcataacaagaaatctcaagcttccgtcagtgatcctatgaatgcactccagagcctgactggcggacctgctgcgggagccgctggaattggcatgcctcctcggggcccgggacagtctctgggcgggatgggtagccttggtgccatgggacagccaatgtctctctcagggcagccgcctcctgggacctcggggatggcccctcacagcatggctgtcgtgtctacggcaactccacagacccagctgcagctccagcaggtggcgctgcagcagcagcagcaacagcagcagttccagcagcagcagcaggcggcgctacagcagcagcagcagcagcagcaacagcagcagttccaggctcagcagagtgccatgcagcagcagttccaagcagtagtgcagcagcagcagcagctccagcagcagcagcagcagcagcagcatctaattaaattgcatcatcaaaatcagcaacagatacagcagcagcaacagcagctgcagcgaatagcacagctgcagctccaacaacagcaacagcagcagcagcagcagcagcagcagcagcagcaggctttgcaggcccagccaccaattcagcagccaccgatgcagcagccacagcctccgccctcccaggctctgccccagcagctgcagcagatgcatcacacacagcaccaccagccgccaccacagccccagcagcctccagttgctcagaaccaaccatcacaactcccgccacagtcgcagacccagcctttggtgtcacaggcgcaagctctccctggacaaatgttgtatacccaaccaccactgaaatttgtccgagctccgatggtggtgcagcagcccccagtgcagccccaggtgcagcagcagcagacagcagtacagacagctcaggctgcccagatggtggctcccggagtccagatgatcacggaagccttggcccaaggtgggatgcacataagagcccggttcccgcctaccaccgctgtgtccgccatcccgtcaagctccatccctttgggcagacagcccatggcacaggtcagccagagcagcctccccatgctgtcctcgccgtcaccgggccagcaggtgcagaccccgcagtcgatgccccctcccccccagccgtccccgcagcccggccagcccagctcacagcccaactccaacgtcagctctggccctgccccatctcccagtagcttcctgcccagcccctcaccgcagccctcccagagcccagtgacggcgcggaccccacagaacttcagtgtcccctcacctggacctttaaacacacctgtgaaccccagctctgtcatgagcccagctggctccagccaggctgaggagcagcagtacctggacaagctgaagcagctgtcgaagtacatcgagcccctgcgccgcatgatcaacaagatcgacaagaacgaagacagaaaaaaggacctgagtaagatgaagagccttctggacattctgacagacccctcgaagcggtgtcccctgaagaccttgcaaaagtgtgagatcgccctggagaaactcaagaatgacatggcggtgcccactcccccaccgcccccggtgccaccgaccaaacagcagtacctatgccagccgctcctggatgccgtcctggccaacatccgctcacctgtcttcaaccattccctgtaccgcacattcgttccagccatgaccgccattcacggcccacccatcacggccccagtggtgtgcacccggaagcgcaggcttgaggatgatgagcggcagagcatccccagtgtgctccagggtgaggtggccaggctggaccccaagttcctggtaaacctggacccttctcactgcagcaacaatggcactgtccacctgatctgcaagctggatgacaaggacctcccaagtgtgccaccactggagctcagtgtgcccgctgactatcctgcccaaagcccgctgtggatagaccggcagtggcagtacgacgccaaccccttcctccagtcggtgcaccgctgcatgacctccaggctgctgcagctcccggacaagcactcggtcaccgccttgctcaacacctgggcccagagcgtccaccaggcctgcctctcagccgcctagccaagactgcagggatggcccgcagcctcatcggggccaaggacacacgcctcctgtcagacacttctaggtgttggcttccttagagagcctggggttaggttagctttcctgcttttatcttctgccttggggacctgccaaacgaaatcccacacctgtacagaactgggataggcgcagtggagcgggttgcttggggggcgttggccgacttcttagagaaggccctccatgtgacttcctcccaggagccagatgcgatcctcaggctgctctcaccgtggcctgtccacggtccaggtccatctcagcagcgtgagggtgcactcagggtgttgttagagcgtctcgtgtgtgctagacgcacccctactcgttcctatagaacacagaggacataggaaacccttaaaacacacatgggattctctggtcacagttttgggttcaggctatgctgctttgggcaggtggagcaccccccgaggaagcctgcaagtccagggcacaggctgccttttggagggagggctggcccataggtgctgctggctccccgccaccagctgggcctcagccctcacggcattcctgctgagcaccgtggggcacccagggagcaggggcgtcagggatcctgctgccggcacccctgtgccgctggcatgagggccgtgtccccactgtgaaggatgaagagcaaggccctcaggacccgtgtcctcagagcaccacacactgagcacccagagacagcgggcctggcagcgggccgggccatgcagggagcgcctccctatgttgcctgccactctgggcaccggccagcaccctctggtgagaagaggtcccccctttttatgtgcactaccccaccatctgtgattataataaatttattattcctgtgtttgtcagttgttc

SEQ ID NO: 11002 - protein, 788 aa, Homo sapiens; identical to SEQ ID NO: 1705

SEQ ID NO: 11003 - DNA, 3308 bp, Homo sapiens
cccacaagccctccttcacttccggctcggccgaggcactgcggacggcttccgggtttgggcctggctctgtgactgaggcggcggcggtggcggccaagcgggatacgggcggcgggagctggggaacaggcatggacgtttccgggcaagagaccgactggcggagcaccgccttccggcagaagctggtcagtcaaatcgaggatgccatgaggaaagctggtgtggcacacagtaaatccagcaaggatatggagagccatgttttcctgaaggccaagacccgggacgaatacctttctctcgtggccaggctcattatccattttcgagacattcataacaagaaatctcaagcttccgtcagtgatcctatgaatgcactccagagcctgactggcggacctgctgcgggagccgctggaattggcatgcctcctcggggcccgggacagtctctgggcgggatgggtagccttggtgccatgggacagccaatgtctctctcagggcagccgcctcctgggacctcggggatggcccctcacagcatggctgtcgtgtctacggcaactccacagacccagctgcagctccagcaggtggcgctgcagcagcagcagcaacagcagcagttccagcagcagcagcaggcggcgctacagcagcagcagcagcagcagcaacagcagcagttccaggctcagcagagtgccatgcagcagcagttccaagcagtagtgcagcagcagcagcagctccagcagcagcagcagcagcagcagcatctaattaaattgcatcatcaaaatcagcaacagatacagcagcagcaacagcagctgcagcgaatagcacagctgcagctccaacaacagcaacagcagcagcagcagcagcagcagcagcagcagcaggctttgcaggcccagccaccaattcagcagccaccgatgcagcagccacagcctccgccctcccaggctctgccccagcagctgcagcagatgcatcacacacagcaccaccagccgccaccacagccccagcagcctccagttgctcagaaccaaccatcacaactcccgccacagtcgcagacccagcctttggtgtcacaggcgcaagctctccctggacaaatgttgtatacccaaccaccactgaaatttgtccgagctccgatggtggtgcagcagcccccagtgcagccccaggtgcagcagcagcagacagcagtacagacagctcaggctgcccagatggtggctcccggagtccaggtcagccagagcagcctccccatgctgtcctcgccgtcaccgggccagcaggtgcagaccccgcagtcgatgccccctcccccccagccgtccccgcagcccggccagcccagctcacagcccaactccaacgtcagctctggccctgccccatctcccagtagcttcctgcccagcccctcaccgcagccctcccagagcccagtgacggcgcggaccccacagaacttcagtgtcccctcacctggacctttaaacacacctgtgaaccccagctctgtcatgagcccagctggctccagccaggctgaggagcagcagtacctggacaagctgaagcagctgtcgaagtacatcgagcccctgcgccgcatgatcaacaagatcgacaagaacgaagacagaaaaaaggacctgagtaagatgaagagccttctggacattctgacagacccctcgaagcggtgtcccctgaagaccttgcaaaagtgtgagatcgccctggagaaactcaagaatgacatggcggtgcccactcccccaccgcccccggtgccaccgaccaaacagcagtacctatgccagccgctcctggatgccgtcctggccaacatccgctcacctgtcttcaaccattccctgtaccgcacattcgttccagccatgaccgccattcacggcccacccatcacggccccagtggtgtgcacccggaagcgcaggcttgaggatgatgagcggcagagcatccccagtgtgctccagggtgaggtggccaggctggaccccaagttcctggtaaacctggacccttctcactgcagcaacaatggcactgtccacctgatctgcaagctggatgacaaggacctcccaagtgtgccaccactggagctcagtgtgcccgctgactatcctgcccaaagcccgctgtggatagaccggcagtggcagtacgacgccaaccccttcctccagtcggtgcaccgctgcatgacctccaggctgctgcagctcccggacaagcactcggtcaccgccttgctcaacacctgggcccagagcgtccaccaggcctgcctctcagccgcctagccaagactgcagggatggcccgcagcctcatcggggccaaggacacacgcctcctgtcagacacttctaggtgttggcttccttagagagcctggggttaggttagctttcctgcttttatcttctgccttggggacctgccaaacgaaatcccacacctgtacagaactgggataggcgcagtggagcgggttgcttggggggcgttggccgacttcttagagaaggccctccatgtgacttcctcccaggagccagatgcgatcctcaggctgctctcaccgtggcctgtccacggtccaggtccatctcagcagcgtgagggtgcactcagggtgttgttagagcgtctcgtgtgtgctagacgcacccctactcgttcctatagaacacagaggacataggaaacccttaaaacacacatgggattctctggtcacagttttgggttcaggctatgctgctttgggcaggtggagcaccccccgaggaagcctgcaagtccagggcacaggctgccttttggagggagggctggcccataggtgctgctggctccccgccaccagctgggcctcagccctcacggcattcctgctgagcaccgtggggcacccagggagcaggggcgtcagggatcctgctgccggcacccctgtgccgctggcatgagggccgtgtccccactgtgaaggatgaagagcaaggccctcaggacccgtgtcctcagagcaccacacactgagcacccagagacagcgggcctggcagcgggccgggccatgcagggagcgcctccctatgttgcctgccactctgggcaccggccagcaccctctggtgagaagaggtcccccctttttatgtgcactaccccaccatctgtgattataataaatttattattcctgtgtttgtcagttgttc

SEQ ID NO: 11004 - protein, 748 aa, Homo sapiens; identical to SEQ ID NO: 1707

SEQ ID NO: 11005 - DNA, 3082 bp, Homo sapiens
cttcacttccggctcggccgaggcactgcggacggcttccgggtttgggcctggctctgtgactgaggcggcggcggtggcggccaagcgggatacgggcggcgggagctggggaacaggcatggacgtttccgggcaagagaccgactggcggagcaccgccttccggcagaagctggtcagtcaaatcgaggatgccatgaggaaagctggtgtggcacacagtaaatccagcaaggatatggagagccatgttttcctgaaggccaagacccgggacgaatacctttctctcgtggccaggctcattatccattttcgagacattcataacaagaaatctcaagcttccgtcagtgcccagctgcagctccagcaggtggcgctgcagcagcagcagcaacagcagcagttccagcagcagcagcaggcggcgctacagcagcagcagcagcagcagcaacagcagcagttccaggctcagcagagtgccatgcagcagcagttccaagcagtagtgcagcagcagcagcagctccagcagcagcagcagcagcagcagcatctaattaaattgcatcatcaaaatcagcaacagatacagcagcagcaacagcagctgcagcgaatagcacagctgcagctccaacaacagcaacagcagcagcagcagcagcagcagcagcagcagcaggctttgcaggcccagccaccaattcagcagccaccgatgcagcagccacagcctccgccctcccaggctctgccccagcagctgcagcagatgcatcacacacagcaccaccagccgccaccacagccccagcagcctccagttgctcagaaccaaccatcacaactcccgccacagtcgcagacccagcctttggtgtcacaggcgcaagctctccctggacaaatgttgtatacccaaccaccactgaaatttgtccgagctccgatggtggtgcagcagcccccagtgcagccccaggtgcagcagcagcagacagcagtacagacagctcaggctgcccagatggtggctcccggagtccaggtcagccagagcagcctccccatgctgtcctcgccgtcaccgggccagcaggtgcagaccccgcagtcgatgccccctcccccccagccgtccccgcagcccggccagcccagctcacagcccaactccaacgtcagctctggccctgccccatctcccagtagcttcctgcccagcccctcaccgcagccctcccagagcccagtgacggcgcggaccccacagaacttcagtgtcccctcacctggacctttaaacacacctgtgaaccccagctctgtcatgagcccagctggctccagccaggctgaggagcagcagtacctggacaagctgaagcagctgtcgaagtacatcgagcccctgcgccgcatgatcaacaagatcgacaagaacgaagacagaaaaaaggacctgagtaagatgaagagccttctggacattctgacagacccctcgaagcggtgtcccctgaagaccttgcaaaagtgtgagatcgccctggagaaactcaagaatgacatggcggtgcccactcccccaccgcccccggtgccaccgaccaaacagcagtacctatgccagccgctcctggatgccgtcctggccaacatccgctcacctgtcttcaaccattccctgtaccgcacattcgttccagccatgaccgccattcacggcccacccatcacggccccagtggtgtgcacccggaagcgcaggcttgaggatgatgagcggcagagcatccccagtgtgctccagggtgaggtggccaggctggaccccaagttcctggtaaacctggacccttctcactgcagcaacaatggcactgtccacctgatctgcaagctggatgacaaggacctcccaagtgtgccaccactggagctcagtgtgcccgctgactatcctgcccaaagcccgctgtggatagaccggcagtggcagtacgacgccaaccccttcctccagtcggtgcaccgctgcatgacctccaggctgctgcagctcccggacaagcactcggtcaccgccttgctcaacacctgggcccagagcgtccaccaggcctgcctctcagccgcctagccaagactgcagggatggcccgcagcctcatcggggccaaggacacacgcctcctgtcagacacttctaggtgttggcttccttagagagcctggggttaggttagctttcctgcttttatcttctgccttggggacctgccaaacgaaatcccacacctgtacagaactgggataggcgcagtggagcgggttgcttggggggcgttggccgacttcttagagaaggccctccatgtgacttcctcccaggagccagatgcgatcctcaggctgctctcaccgtggcctgtccacggtccaggtccatctcagcagcgtgagggtgcactcagggtgttgttagagcgtctcgtgtgtgctagacgcacccctactcgttcctatagaacacagaggacataggaaacccttaaaacacacatgggattctctggtcacagttttgggttcaggctatgctgctttgggcaggtggagcaccccccgaggaagcctgcaagtccagggcacaggctgccttttggagggagggctggcccataggtgctgctggctccccgccaccagctgggcctcagccctcacggcattcctgctgagcaccgtggggcacccagggagcaggggcgtcagggatcctgctgccggcacccctgtgccgctggcatgagggccgtgtccccactgtgaaggatgaagagcaaggccctcaggacccgtgtcctcagagcaccacacactgagcacccagagacagcgggcctggcagcgggccgggccatgcagggagcgcctccctatgttgcctgccactctgggcaccggccagcaccctctggtgagaagaggtcccccctttttatgtgcactaccccaccatctgtgattataataaatttattattcctgtgtttgtcagttgttc

SEQ ID NO: 11006 - protein, 677 aa, Homo sapiens
MDVSGQETDWRSTAFRQKLVSQIEDAMRKAGVAHSKSSKDMESHVFLKAKTRDEYLSLVARLIIHFRDIHNKKSQASVSAQLQLQQVALQQQQQQQQFQQQQQAALQQQQQQQQQQQFQAQQSAMQQQFQAVVQQQQQLQQQQQQQQHLIKLHHQNQQQIQQQQQQLQRIAQLQLQQQQQQQQQQQQQQQQALQAQPPIQQPPMQQPQPPPSQALPQQLQQMHHTQHHQPPPQPQQPPVAQNQPSQLPPQSQTQPLVSQAQALPGQMLYTQPPLKFVRAPMVVQQPPVQPQVQQQQTAVQTAQAAQMVAPGVQVSQSSLPMLSSPSPGQQVQTPQSMPPPPQPSPQPGQPSSQPNSNVSSGPAPSPSSFLPSPSPQPSQSPVTARTPQNFSVPSPGPLNTPVNPSSVMSPAGSSQAEEQQYLDKLKQLSKYIEPLRRMINKIDKNEDRKKDLSKMKSLLDILTDPSKRCPLKTLQKCEIALEKLKNDMAVPTPPPPPVPPTKQQYLCQPLLDAVLANIRSPVFNHSLYRTFVPAMTAIHGPPITAPVVCTRKRRLEDDERQSIPSVLQGEVARLDPKFLVNLDPSHCSNNGTVHLICKLDDKDLPSVPPLELSVPADYPAQSPLWIDRQWQYDANPFLQSVHRCMTSRLLQLPDKHSVTALLNTWAQSVHQACLSAA

SEQ ID NO: 11007 - DNA, 605 bp, Homo sapiens
actgcggacggcttccgggtttgggcctggctctgtgactgaggcggcggcggtggcggccaagcgggatacgggcggcgggagctggggaacaggcatggacgtttccgggcaagagaccgactggcggagcaccgccttccggcagaagctggtcagtcaaatcgaggatgccatgaggaaagctggtgtggcacacagtaaatccagcaaggatatggagagccatgttttcctgaaggccaagacccgggacgaatacctttctctcgtggccaggctcattatccattttcgagacattcgtaagtaagattttgcatttctgggttgttgagatctctgtgagaggccagccctgacgctgcctcggcagagctttctgggcaggccgtggtgcctgagtcagaaggtctgtgtcacctcacttgcttctgggaagttcttcactgccttgcatttgactccagatccctccatcctcccagagccttggcctcaaaaatgctgattctagcatcatggaaatgctgtcctcaaagtggtctaaacgggttgctgcttcacttgctcacttaatctcccttttcatagggctgttgttt

SEQ ID NO: 11008 - protein, 71 aa, Homo sapiens
MDVSGQETDWRSTAFRQKLVSQIEDAMRKAGVAHSKSSKDMESHVFLKAKTRDEYLSLVARLIIHFRDIRK

SEQ ID NO: 11009 - DNA, 378 bp, Homo sapiens
actgcggacggcttccgggtttgggcctggctctgtgactgaggcggcggcggtggcggccaagcgggatacgggcggcgggagctggggaacaggcatggacgtttccgggcaagagaccgactggcggagcaccgccttccggcagaagctggtcagtcaaatcgaggatgccatgaggaaagctggtgtggcacacagtaaatccagcaaggatatggagagccatgttttcctgaaggccaagacccgggacgaatacctttctctcgtggccaggctcattatccattttcgagacattcataacaagaaatctcaagcttccgtcagtgatcctatgaatgcactccagagcctgactggcggacctgctgc

SEQ ID NO: 11010 - protein, 92 aa, Homo sapiens
MDVSGQETDWRSTAFRQKLVSQIEDAMRKAGVAHSKSSKDMESHVFLKAKTRDEYLSLVARLIIHFRDIHNKKSQASVSDPMNALQSLTGGP

SEQ ID NO: 11011 - DNA, 2830 bp, Homo sapiens
ggcttccgggtttgggcctggctctgtgactgaggcggcggcggtggcggccaagcgggatacgggcggcgggagctggggaacaggcatggacgtttccgggcaagagaccgactggcggagcaccgccttccggcagaagctggtcagtcaaatgacgaatacctttctctcgtggccaggctcattatccattttcgagacattcataacaagaaatctcaagcttccgtcagtgatcctatgaatgcactccagagcctgactggcggacctgctgcgggagccgctggaattggcatgcctcctcggggcccgggacagtctctgggcgggatgggtagccttggtgccatgggacagccaatgtctctctcagggcagccgcctcctgggacctcggggatggcccctcacagcatggctgtcgtgtctacggcaactccacagacccagctgcagctccagcaggtggcgcttctaattaaattgcatcatcaaaatcagcaacaggtaccagcagctgcagcagatgcatcacacacagcaccaccagccgccaccacagccccagcagcctccagttgctcagaaccaaccatcacaactcccgccacagtcgcagacccagcctttggtgtcacaggcgcaagctctccctggacaaatgttgtatacccaaccaccactgaaatttgtccgagctccgatggtggtgcagcagcccccagtgcagccccaggtgcagcagcagcagacagcagtacagacagctcaggctgcccagatggtggctcccggagtccaggtcagccagagcagcctccccatgctgtcctcgccgtcaccgggccagcaggtgcagaccccgcagtcgatgccccctcccccccagccgtccccgcagcccggccagcccagctcacagcccaactccaacgtcagctctggccctgccccatctcccagtagcttcctgcccagcccctcaccgcagccctcccagagcccagtgacggcgcggaccccacagaacttcagtgtcccctcacctggacctttaaacacacctgtgaaccccagctctgtcatgagcccagctggctccagccaggctgaggagcagcagtacctggacaagctgaagcagctgtcgaagtacatcgagcccctgcgccgcatgatcaacaagatcgacaagaacgaagacagaaaaaaggacctgagtaagatgaagagccttctggacattctgacagacccctcgaagcggtgtcccctgaagaccttgcaaaagtgtgagatcgccctggagaaactcaagaatgacatggcggtgcccactcccccaccgcccccggtgccaccgaccaaacagcagtacctatgccagccgctcctggatgccgtcctggccaacatccgctcacctgtcttcaaccattccctgtaccgcacattcgttccagccatgaccgccattcacggcccacccatcacggccccagtggtgtgcacccggaagcgcaggcttgaggatgatgagcggcagagcatccccagtgtgctccagggtgaggtggccaggctggaccccaagttcctggtaaacctggacccttctcactgcagcaacaatggcactgtccacctgatctgcaagctggatgacaaggacctcccaagtgtgccaccactggagctcagtgtgcccgctgactatcctgcccaaagcccgctgtggatagaccggcagtggcagtacgacgccaaccccttcctccagtcggtgcaccgctgcatgacctccaggctgctgcagctcccggacaagcactcggtcaccgccttgctcaacacctgggcccagagcgtccaccaggcctgcctctcagccgcctagccaagactgcagggatggcccgcagcctcatcggggccaaggacacacgcctcctgtcagacacttctaggtgttggcttccttagagagcctggggttaggttagctttcctgcttttatcttctgccttggggacctgccaaacgaaatcccacacctgtacagaactgggataggcgcagtggagcgggttgcttggggggcgttggccgacttcttagagaaggccctccatgtgacttcctcccaggagccagatgcgatcctcaggctgctctcaccgtggcctgtccacggtccaggtccatctcagcagcgtgagggtgcactcagggtgttgttagagcgtctcgtgtgtgctagacgcacccctactcgttcctatagaacacagaggacataggaaacccttaaaacacacatgggattctctggtcacagttttgggttcaggctatgctgctttgggcaggtggagcaccccccgaggaagcctgcaagtccagggcacaggctgccttttggagggagggctggcccataggtgctgctggctccccgccaccagctgggcctcagccctcacggcattcctgctgagcaccgtggggcacccagggagcaggggcgtcagggatcctgctgccggcacccctgtgccgctggcatgagggccgtgtccccactgtgaaggatgaagagcaaggccctcaggacccgtgtcctcagagcaccacacactgagcacccagagacagcgggcctggcagcgggccgggccatgcagggagcgcctccctatgttgcctgccactctgggcaccggccagcaccctctggtgagaagaggtcccccctttttatgtgcactaccccaccatctgtgattataataaatttattattcctgtgtttgtcagttgttc

SEQ ID NO: 11012 - protein, 456 aa, Homo sapiens
MHHTQHHQPPPQPQQPPVAQNQPSQLPPQSQTQPLVSQAQALPGQMLYTQPPLKFVRAPMVVQQPPVQPQVQQQQTAVQTAQAAQMVAPGVQVSQSSLPMLSSPSPGQQVQTPQSMPPPPQPSPQPGQPSSQPNSNVSSGPAPSPSSFLPSPSPQPSQSPVTARTPQNFSVPSPGPLNTPVNPSSVMSPAGSSQAEEQQYLDKLKQLSKYIEPLRRMINKIDKNEDRKKDLSKMKSLLDILTDPSKRCPLKTLQKCEIALEKLKNDMAVPTPPPPPVPPTKQQYLCQPLLDAVLANIRSPVFNHSLYRTFVPAMTAIHGPPITAPVVCTRKRRLEDDERQSIPSVLQGEVARLDPKFLVNLDPSHCSNNGTVHLICKLDDKDLPSVPPLELSVPADYPAQSPLWIDRQWQYDANPFLQSVHRCMTSRLLQLPDKHSVTALLNTWAQSVHQACLSAA

SEQ ID NO: 11013 - DNA, 652 bp, Homo sapiens
attgaaagaactaacctgcagaaaaggctgctgcccttcaaactgtgtactgttgtctaagctagttcagaagaatacacgagcttccttcacatactccaatctgttggtttgacttctgaagaaccagcagagttggaaaggcctcgagatctctgtcctggtgctggcctggggctcccctaggtctcgcctgaaagtgtcccattcaccaccagtcttctacaatgttatccggaatggaacgaagtactacacccacaagtcctgaaggtactgaccaaaacaggagggagagacgggaccggggctgctgtgactggaggctgatggggctccaccgtgccccatcctctcatcccacagtcttccttcacatctgctctgcccaccacagccctgctctggagttctctgctctgccacttctgccatccccacctaggcagacaggtttcatccagcctccaggacggcccacccacttgctcctgcagcaggctgctcttcccaggtgcacagcccagagaattaagtgcatatatttaccagaagacatgaccaaagccattcctggggttgccttcatgtagccaacatctggaactaacaccaaagttcattaggcacaaaataaaagagttatctggaa

SEQ ID NO: 11014 - protein, 121 aa, Homo sapiens
MLSGMERSTTPTSPEGTDQNRRERRDRGCCDWRLMGLHRAPSSHPTVFLHICSAHHSPALEFSALPLLPSPPRQTGFIQPPGRPTHLLLQQAALPRCTAQRIKCIYLPEDMTKAIPGVAFM

SEQ ID NO: 11015 - DNA, 553 bp, Homo sapiens
aaatgaaagcccttctttacagatagtgcaaagacacagcggcccacccacggctgcctctgacaggccttgtgccctcaggccagcgcctcatcacccccaacctgcctgtcccctttgtgatgaagagagggcactcaagatggctcccagctctctcagctgagtgcctttccatcaggggagaggagtggccgttggaggctctctgtccccttcttgtttctttgtgcctgttattggccagcctagctgagcactgacggctctcttccgagaggcggattccagaggaggccgagcaagcgtctgaatctgccttgcaggatgggcttcagctcggtgccagcaggcgagggggcgggaagggggagtccgatgactgcgcttcttcatctggtattaaactgcttcctgtttttacttttaggacgaatacctttctctcgtggccaggctcattatccattttcgagacattcataacaagaaatctcaagcttccgtcagtgatcctatgaatgcactccagagcctgactggcggacctgct

SEQ ID NO: 11016 - protein, 52 aa, Homo sapiens
MGFSSVPAGEGAGRGSPMTALLHLVLNCFLFLLLGRIPFSRGQAHYPFSRHS

SEQ ID NO: 11017 - DNA, 3633 bp, Homo sapiens
ggcatggcggtcctgccaggacatacctgtctgtgggtagctgtttgctgtgaagtccacactgttgtgacaatggcatccttgtccttggttgtggcattgctcactgagctgctgacctggtgggcttgggacatttctcctcagtgctctgtggagccctcctctgcacccctaagctgttctggcatggtggccctgcacacaggggcccaggctgagttggactctgcaacagcacgagtggagctgtgtgtgcctgtggacttgtgccctccctgggagagcgtcccctggccactgtgttaccgcttgctcagaagggcccatcgtgctttgtacgctcacccagcaggagggctggacagccaggagaggcaggggttgccacctgccctcaaggcctcagcccatctttagtgtatctgcaggcatcagagaggtcatttgtcccttaacattaggactctggtccaggccaggctagaggtatgggtcatgcagtgaccaacacacctggcgtcctagccattcatatttgggagtctccaggagcctagtctcttactgcttggggctgtgaggggattgagcctgtaggtaggcgagatctgtgctctgtgagccttacgccctttgagccatggtcagtctggtaggccctttcctgagaagctctgcccttgtgttcccacagatcctatgaatgcactccagagcctgactggcggacctgctgcgggagccgctggaattggcatgcctcctcggggcccgggacagtctctgggcgggatgggtagccttggtgccatgggacagccaatgtctctctcagggcagccgcctcctgggacctcggggatggcccctcacagcatggctgtcgtgtctacggcaactccacagacccagctgcagctccagcaggtggcgctgcagcagcagcagcaacagcagcagttccagcagcagcagcaggcggcgctacagcagcagcagcagcagcagcaacagcagcagttccaggctcagcagagtgccatgcagcagcagttccaagcagtagtgcagcagcagcagcagctccagcagcagcagcagcagcagcagcatctaattaaattgcatcatcaaaatcagcaacagatacagcagcagcaacagcagctgcagcgaatagcacagctgcagctccaacaacagcaacagcagcagcagcagcagcagcagcagcagcagcaggctttgcaggcccagccaccaattcagcagccaccgatgcagcagccacagcctccgccctcccaggctctgccccagcagctgcagcagatgcatcacacacagcaccaccagccgccaccacagccccagcagcctccagttgctcagaaccaaccatcacaactcccgccacagtcgcagacccagcctttggtgtcacaggcgcaagctctccctggacaaatgttgtatacccaaccaccactgaaatttgtccgagctccgatggtggtgcagcagcccccagtgcagccccaggtgcagcagcagcagacagcagtacagacagctcaggctgcccagatggtggctcccggagtccaggtcagccagagcagcctccccatgctgtcctcgccgtcaccgggccagcaggtgcagaccccgcagtcgatgccccctcccccccagccgtccccgcagcccggccagcccagctcacagcccaactccaacgtcagctctggccctgccccatctcccagtagcttcctgcccagcccctcaccgcagccctcccagagcccagtgacggcgcggaccccacagaacttcagtgtcccctcacctggacctttaaacacacctgtgaaccccagctctgtcatgagcccagctggctccagccaggctgaggagcagcagtacctggacaagctgaagcagctgtcgaagtacatcgagcccctgcgccgcatgatcaacaagatcgacaagaacgaagacagaaaaaaggacctgagtaagatgaagagccttctggacattctgacagacccctcgaagcggtgtcccctgaagaccttgcaaaagtgtgagatcgccctggagaaactcaagaatgacatggcggtgcccactcccccaccgcccccggtgccaccgaccaaacagcagtacctatgccagccgctcctggatgccgtcctggccaacatccgctcacctgtcttcaaccattccctgtaccgcacattcgttccagccatgaccgccattcacggcccacccatcacggccccagtggtgtgcacccggaagcgcaggcttgaggatgatgagcggcagagcatccccagtgtgctccagggtgaggtggccaggctggaccccaagttcctggtaaacctggacccttctcactgcagcaacaatggcactgtccacctgatctgcaagctggatgacaaggacctcccaagtgtgccaccactggagctcagtgtgcccgctgactatcctgcccaaagcccgctgtggatagaccggcagtggcagtacgacgccaaccccttcctccagtcggtgcaccgctgcatgacctccaggctgctgcagctcccggacaagcactcggtcaccgccttgctcaacacctgggcccagagcgtccaccaggcctgcctctcagccgcctagccaagactgcagggatggcccgcagcctcatcggggccaaggacacacgcctcctgtcagacacttctaggtgttggcttccttagagagcctggggttaggttagctttcctgcttttatcttctgccttggggacctgccaaacgaaatcccacacctgtacagaactgggataggcgcagtggagcgggttgcttggggggcgttggccgacttcttagagaaggccctccatgtgacttcctcccaggagccagatgcgatcctcaggctgctctcaccgtggcctgtccacggtccaggtccatctcagcagcgtgagggtgcactcagggtgttgttagagcgtctcgtgtgtgctagacgcacccctactcgttcctatagaacacagaggacataggaaacccttaaaacacacatgggattctctggtcacagttttgggttcaggctatgctgctttgggcaggtggagcaccccccgaggaagcctgcaagtccagggcacaggctgccttttggagggagggctggcccataggtgctgctggctccccgccaccagctgggcctcagccctcacggcattcctgctgagcaccgtggggcacccagggagcaggggcgtcagggatcctgctgccggcacccctgtgccgctggcatgagggccgtgtccccactgtgaaggatgaagagcaaggccctcaggacccgtgtcctcagagcaccacacactgagcacccagagacagcgggcctggcagcgggccgggccatgcagggagcgcctccctatgttgcctgccactctgggcaccggccagcaccctctggtgagaagaggtcccccctttttatgtgcactaccccaccatctgtgattataataaatttattattcctgtgtttgtcagttgttc

SEQ ID NO: 11018 - protein, 667 aa, Homo sapiens
MNALQSLTGGPAAGAAGIGMPPRGPGQSLGGMGSLGAMGQPMSLSGQPPPGTSGMAPHSMAVVSTATPQTQLQLQQVALQQQQQQQQFQQQQQAALQQQQQQQQQQQFQAQQSAMQQQFQAVVQQQQQLQQQQQQQQHLIKLHHQNQQQIQQQQQQLQRIAQLQLQQQQQQQQQQQQQQQQALQAQPPIQQPPMQQPQPPPSQALPQQLQQMHHTQHHQPPPQPQQPPVAQNQPSQLPPQSQTQPLVSQAQALPGQMLYTQPPLKFVRAPMVVQQPPVQPQVQQQQTAVQTAQAAQMVAPGVQVSQSSLPMLSSPSPGQQVQTPQSMPPPPQPSPQPGQPSSQPNSNVSSGPAPSPSSFLPSPSPQPSQSPVTARTPQNFSVPSPGPLNTPVNPSSVMSPAGSSQAEEQQYLDKLKQLSKYIEPLRRMINKIDKNEDRKKDLSKMKSLLDILTDPSKRCPLKTLQKCEIALEKLKNDMAVPTPPPPPVPPTKQQYLCQPLLDAVLANIRSPVFNHSLYRTFVPAMTAIHGPPITAPVVCTRKRRLEDDERQSIPSVLQGEVARLDPKFLVNLDPSHCSNNGTVHLICKLDDKDLPSVPPLELSVPADYPAQSPLWIDRQWQYDANPFLQSVHRCMTSRLLQLPDKHSVTALLNTWAQSVHQACLSAA

SEQ ID NO: 11019 - DNA, 3151 bp, Homo sapiens
cccgccacagtcgcagacccagcctttggtgtcacaggcgcaagctctccctggacaaatgttgtatacccaaccaccactgaaatttgtccgagctccgatggtggtgcagcagcccccagtgcagccccaggtgcagcagcagcagacagcagtacagacagctcaggctgcccagatggtggctcccggagtccagatgatcacggaagccttggcccaaggtgggatgcacataagagcccggttcccgcctaccaccgctgtgtccgccatcccgtcaagctccatccctttgggcagacagcccatggcacaggtcagccagagcagcctccccatgctgtcctcgccgtcaccgggccagcaggtgcagaccccgcagtcgatgccccctcccccccagccgtccccgcagcccggccagcccagctcacagcccaactccaacgtcagctctggccctgccccatctcccagtagcttcctgcccagcccctcaccgcagccctcccagagcccagtgacggcgcggaccccacagaacttcagtgtcccctcacctggacctttaaacacacctgtgaaccccagctctgtcatgagcccagctggctccagccaggctgaggagcagcagtacctggacaagctgaagcagctgtcgaagtacatcgagcccctgcgccgcatgatcaacaagatcgacaagaacgaagacagaaaaaaggacctgagtaagatgaagagccttctggacattctgacagacccctcgaagcggtgagctttgcccacagcccacggagggtccacaagggcacagatagcccagccatggatgggcacttggtgatgatgtgggtttaacaaaggcaccaggcagctctttggaccctggccagaggcctccaaggctccactctggtgtgtgctggggcttcaagcccaggcttcatcttggcccatgcccagcctttgccctattcctggctgctgctgtggccctcatgctgggccatcacagccagacctcatccagtcagcagccaggggcccagcttgcagtggcctgaccatcagctggcccagatgggcctgagcctgacctggagttctgcccctgacttgctggtgaccatgggcaggcgactgcatctcagttaccccatttgtagcccacgtgtgttgtcatgaaaatgaaacaaggtggcgctggtgagaagcaggtggaaggcagggctgctggccacaggctgctgtgaggatcagagctcgggcagtacctccaaactgcatgggcattggcatatacctccctttcacctcaactcaggctatcccccaacccctgtctagaagggtctctctgttctgcttgtctggatagaatgccagtcactattgggtggtcctccaggtcttcatgggttgatcctttgttagggttatagggatgagtggggcagggactggcctacatgacaatgaggcattcacagcctgatcaggggcctggccactgtcccttctcttgacccatcacctcactctgccaaccagggacaagcagctcctggggttgagggctgcctgccttcaactctgggtctgggaacagctggtcaactggtaggagctcctgcagaggtttctgatggctgaggcccagtggcagtagttgggatcctgagcctgagaactgccatgtcttccactctttcagcccaagtcctctctctctgcaggtgtcccctgaagaccttgcaaaagtgtgagatcgccctggagaaactcaagaatgacatggcggtggtgagtgggatgccagacacccctaggggaaccagggctctcctaagagctcctgggagtgctgctgagagggccttcaaggtcagggcatctgggcgggggccgggcctgaccttggaccctgcccacgaggcttcctggccaggtctgctgtgctgggtgggaacatgggagaagtcaccctctgtctacggcccccgtgggtgcctccttcacccatttcagaggaggcagggactgtagggaggataggctgtgggggtgggggattattcccaggatcagccaacattgtctgcacaagggtggaggctgtgagagaggcctcgggaatctgactgtgagtgaccatgggcctggggtgtgaaggccccctaaatggggaaccctcgggtcccgggctgctgaccgtgcccatcctgtctccagcccactcccccaccgcccccggtgccaccgaccaaacagcagtacctatgccagccgctcctggatgccgtcctggccaacatccgctcacctgtcttcaaccattccctgtaccgcacattcgttccagccatgaccgccattcacggcccacccatcacgtatgtccagctgggctgggctttgcggagggcggccagccctgggccgcgtgtgccaggtgtggtcaccatgccgcctccccagggccccagtggtgtgcacccggaagcgcaggcttgaggatgatgagcggcagagcatccccagtgtgctccagggtgaggtggccaggctggaccccaagttcctggtaaacctggacccttctcactgcagcaacaatggcactgtccacctgatctgcaagctgggtgagtgtccagagggccgggactggtgtgggaaagcaggccctgaccgcagccccaggactctgccatccaagccagatggcacagcgcccagaacccaccctgtgttcacgccccgccaggctgtctgctctatcctcacacacaccgggctccagacagcctggccatgcctcagtccccactgccagagcccgcacactctcacctccccaacacagatgtggctttgcttgcctgggccctagggaggtggtaggcaggacctctgggcacccatcaatgcagagcactccaggcttcacgtttggaaatctgagagtcagagagacctcctccaggctttgccacaagcttcaccagaacctccctgggtgtggagtcctgttccagagcagggctgtgaggcagggcaggccggggcttgtccaggtcacagatagagccttctgtgttgcagatgacaaggacctcccaagtgtgccaccactgga

SEQ ID NO: 11020 - protein, 242 aa, Homo sapiens
MLYTQPPLKFVRAPMVVQQPPVQPQVQQQQTAVQTAQAAQMVAPGVQMITEALAQGGMHIRARFPPTTAVSAIPSSSIPLGRQPMAQVSQSSLPMLSSPSPGQQVQTPQSMPPPPQPSPQPGQPSSQPNSNVSSGPAPSPSSFLPSPSPQPSQSPVTARTPQNFSVPSPGPLNTPVNPSSVMSPAGSSQAEEQQYLDKLKQLSKYIEPLRRMINKIDKNEDRKKDLSKMKSLLDILTDPSKR

SEQ ID NO: 11021 - DNA, 3957 bp, Homo sapiens
ctttgtcatttaacgttctattcttttagtatgtgaaaaccaaactctaatttacaagtcacaaagaattatccaagacagactcccattgtggacatgtatgtggcattgctgattcacagctactgtactgaagccttggccaccctggaggaccctctctctttttgctggacccttctgcacagtgactgcagtagggagagtcagacctgggggtgggggagaggttttttggattcctctctgggtagatgtgtgttgggaagtagtgaaatgttgatagctgcctggctcatctgatccagtaaacataactggtgcgtttgggttgaaagaaattgggctttccttatcagttctcagttataagaacatcagtcagcagtacattagacttaagctttgcattccttgcgtttttttgtttgtttttctcttcctggaaaaaagtttgcttctctcataccatctgacttacttccaggcttttctcccttgtggaacgagtgccgttgagccctgctgcactctcagacgggctcctccgaagtgccgcaggtggtggtaaatcgactctcacccactggggtcgctccttcgtgtctccccccggtcggttcatctgttgctctggctgcaggaggaacgagtgagcttctggtcggcgtctgccatgccgtgtcaccccggcttctggcacctcctgtgcgtgcccaggattgtgaatgtgggccgtgtgtgtgaggccacgggtctccctgcagccactctcctgctggagctctgttactggcacctgtcgctgcctgcaccgaaggctggcagcacctcctggagcttgggacccagagcacagcctcccaccatgagatgtgttgtttttctgtggatcagtcctcctttctttctgagcctggcgtgttttgttctagtttgttaccgtcctaagtgcctgtaggccctgctctccagggacgagactcgggctctacccccaactcagaacccagagcaagagtggtcgggcccgggcccacaacagtgctcagctgtcctgctgcctttgtagttcaagaagtgtccattgatgaggggaatggtcctggctcatgctggagttcctgactcgcatccctgtggagatgaacttcctcgtcagggcggaggcctgccaagcagtccccccaggcttctcttgctcacctttgcccatttttattacgaaagaaaaccagttccttgatagataccaggaccatcagcctcaggcctggaggaggagaggaggatgatttgggttcgggctgtaagaggtgtgccactgagaaggagggatgctgtgagcaggcttaactgagctcatggttcagtgggagttgagtgttctcatcacaggctttggtggaatgtactcttgacatctgtccccaggagcctggtctccagaaacaccagctcaggccctcaaggtctggctctgatggttctgtgggctataggattctgatctgttagcgaggtgtgttcagaagtgtgttgaggacaccagtgcaggagagcaaccagtagaacagaaaggtctggaagcagcattcttggcaaatcttctagattcccaatgcccagacagacctggaggtgctgtgggcttgaacatgtgggtggcctcccctcccaggctgccccgagctgcccaagctttccttgccctggtgctccttcttgcagaggctacacgtgccctctccacctgcccaggcactgagtttctttgttgcgatcaccttgtctgttgtccctctgtcctcaaagatgatcacggaagccttggcccaaggtgggatgcacataagagcccggttcccgcctaccaccgctgtgtccgccatcccgtcaagctccatccctttgggcagacagcccatggcacaggtcagccagagcagcctccccatgctgtcctcgccgtcaccgggccagcaggtgcagaccccgcagtcgatgccccctcccccccagccgtccccgcagcccggccagcccagctcacagcccaactccaacgtcagctctggccctgccccatctcccagtagcttcctgcccagcccctcaccgcagccctcccagagcccagtgacggcgcggaccccacagaacttcagtgtcccctcacctggacctttaaacacacctgtgaaccccagctctgtcatgagcccagctggctccagccaggctgaggagcagcagtacctggacaagctgaagcagctgtcgaagtacatcgagcccctgcgccgcatgatcaacaagatcgacaagaacgaagacagaaaaaaggacctgagtaagatgaagagccttctggacattctgacagacccctcgaagcggtgtcccctgaagaccttgcaaaagtgtgagatcgccctggagaaactcaagaatgacatggcggtgcccactcccccaccgcccccggtgccaccgaccaaacagcagtacctatgccagccgctcctggatgccgtcctggccaacatccgctcacctgtcttcaaccattccctgtaccgcacattcgttccagccatgaccgccattcacggcccacccatcacggccccagtggtgtgcacccggaagcgcaggcttgaggatgatgagcggcagagcatccccagtgtgctccagggtgaggtggccaggctggaccccaagttcctggtaaacctggacccttctcactgcagcaacaatggcactgtccacctgatctgcaagctggatgacaaggacctcccaagtgtgccaccactggagctcagtgtgcccgctgactatcctgcccaaagcccgctgtggatagaccggcagtggcagtacgacgccaaccccttcctccagtcggtgcaccgctgcatgacctccaggctgctgcagctcccggacaagcactcggtcaccgccttgctcaacacctgggcccagagcgtccaccaggcctgcctctcagccgcctagccaagactgcagggatggcccgcagcctcatcggggccaaggacacacgcctcctgtcagacacttctaggtgttggcttccttagagagcctggggttaggttagctttcctgcttttatcttctgccttggggacctgccaaacgaaatcccacacctgtacagaactgggataggcgcagtggagcgggttgcttggggggcgttggccgacttcttagagaaggccctccatgtgacttcctcccaggagccagatgcgatcctcaggctgctctcaccgtggcctgtccacggtccaggtccatctcagcagcgtgagggtgcactcagggtgttgttagagcgtctcgtgtgtgctagacgcacccctactcgttcctatagaacacagaggacataggaaacccttaaaacacacatgggattctctggtcacagttttgggttcaggctatgctgctttgggcaggtggagcaccccccgaggaagcctgcaagtccagggcacaggctgccttttggagggagggctggcccataggtgctgctggctccccgccaccagctgggcctcagccctcacggcattcctgctgagcaccgtggggcacccagggagcaggggcgtcagggatcctgctgccggcacccctgtgccgctggcatgagggccgtgtccccactgtgaaggatgaagagcaaggccctcaggacccgtgtcctcagagcaccacacactgagcacccagagacagcgggcctggcagcgggccgggccatgcagggagcgcctccctatgttgcctgccactctgggcaccggccagcaccctctggtgagaagaggtcccccctttttatgtgcactaccccaccatctgtgattataataaatttattattcctgtgtttgtcagttgttc

SEQ ID NO: 11022 - protein, 404 aa, Homo sapiens
MITEALAQGGMHIRARFPPTTAVSAIPSSSIPLGRQPMAQVSQSSLPMLSSPSPGQQVQTPQSMPPPPQPSPQPGQPSSQPNSNVSSGPAPSPSSFLPSPSPQPSQSPVTARTPQNFSVPSPGPLNTPVNPSSVMSPAGSSQAEEQQYLDKLKQLSKYIEPLRRMINKIDKNEDRKKDLSKMKSLLDILTDPSKRCPLKTLQKCEIALEKLKNDMAVPTPPPPPVPPTKQQYLCQPLLDAVLANIRSPVFNHSLYRTFVPAMTAIHGPPITAPVVCTRKRRLEDDERQSIPSVLQGEVARLDPKFLVNLDPSHCSNNGTVHLICKLDDKDLPSVPPLELSVPADYPAQSPLWIDRQWQYDANPFLQSVHRCMTSRLLQLPDKHSVTALLNTWAQSVHQACLSAA

SEQ ID NO: 11023 - DNA, 3186 bp, Homo sapiens
ttcatggccagagtgccccaggagaagcactgagttggtctacagaaatggatggtccaggggcctggctcctaggcagactgtgaggggatgcttggcatgcagggggttgactagggtgtgggaaatgtagcagggccttcagggttcccccagtgtgacaaggcatccctctttgctgagagtccctctaggggaggccagacgcccagggctggcaggcagctgttctccccatcaaagcagccatctgtgctccaccccaggaaggtgtgggtgttttacatatgcttatccctgatgcctgggtggtgtggtttcatccctagagtttacggatgaagacagtggtgtccctggtgcagacactggggtgattgatcttatttgtgtcgtggccagcaaggcctggggagcagagcaacagccttgctttgcatacacacagggcctcagaggactcaggtgcacacctgcatggcagaaccaggctctgggcccaggtgtctgacactgagtagctcgcctctcccaggggcgctggtgtgggccgatgcaagtgccaccatgggtgtgtgtgtggctccctgggccacctcactccaattaagcaggtccaggtgggacagcctgggaccagccctgcagcagcatgtgttaaccacaacagatggctgtagccaccaggcttgtccttggtgcagtcagcctgggggctgcgggggcttgtggaagcatgtgggaagacggtcccactggtcagcagagcagggtcctcaccgacccacagaggagcatgtcacaggacaggcaggcgtgtcagggaaggccaggctagtgccagccaagggcattgcctcccagactgcccttttcctcacactcccacgacacagccctcaaagcctgtgcccctgtgggtccctggccaaggagcaagggctgccctgcctgggccccccccgccagccccttggtcacctcatgctgtgtgccaggctgggggagtgtgcctgtgtgtatgtccaggtggcatttggatgaagacacaggtgtgtggtgaggctgtgcgggaggatgggcctatgcgtgcggtgggcaggtggtgtggaggcaggcgggcgggcgtgtggcagcgcgccggctgagcccctccacttccaggtcagccagagcagcctccccatgctgtcctcgccgtcaccgggccagcaggtgcagaccccgcagtcgatgccccctcccccccagccgtccccgcagcccggccagcccagctcacagcccaactccaacgtcagctctggccctgccccatctcccagtagcttcctgcccagcccctcaccgcagccctcccagagcccagtgacggcgcggaccccacagaacttcagtgtcccctcacctggacctttaaacacacctgtgaaccccagctctgtcatgagcccagctggctccagccaggctgaggagcagcagtacctggacaagctgaagcagctgtcgaagtacatcgagcccctgcgccgcatgatcaacaagatcgacaagaacgaagacagaaaaaaggacctgagtaagatgaagagccttctggacattctgacagacccctcgaagcggtgtcccctgaagaccttgcaaaagtgtgagatcgccctggagaaactcaagaatgacatggcggtgcccactcccccaccgcccccggtgccaccgaccaaacagcagtacctatgccagccgctcctggatgccgtcctggccaacatccgctcacctgtcttcaaccattccctgtaccgcacattcgttccagccatgaccgccattcacggcccacccatcacggccccagtggtgtgcacccggaagcgcaggcttgaggatgatgagcggcagagcatccccagtgtgctccagggtgaggtggccaggctggaccccaagttcctggtaaacctggacccttctcactgcagcaacaatggcactgtccacctgatctgcaagctggatgacaaggacctcccaagtgtgccaccactggagctcagtgtgcccgctgactatcctgcccaaagcccgctgtggatagaccggcagtggcagtacgacgccaaccccttcctccagtcggtgcaccgctgcatgacctccaggctgctgcagctcccggacaagcactcggtcaccgccttgctcaacacctgggcccagagcgtccaccaggcctgcctctcagccgcctagccaagactgcagggatggcccgcagcctcatcggggccaaggacacacgcctcctgtcagacacttctaggtgttggcttccttagagagcctggggttaggttagctttcctgcttttatcttctgccttggggacctgccaaacgaaatcccacacctgtacagaactgggataggcgcagtggagcgggttgcttggggggcgttggccgacttcttagagaaggccctccatgtgacttcctcccaggagccagatgcgatcctcaggctgctctcaccgtggcctgtccacggtccaggtccatctcagcagcgtgagggtgcactcagggtgttgttagagcgtctcgtgtgtgctagacgcacccctactcgttcctatagaacacagaggacataggaaacccttaaaacacacatgggattctctggtcacagttttgggttcaggctatgctgctttgggcaggtggagcaccccccgaggaagcctgcaagtccagggcacaggctgccttttggagggagggctggcccataggtgctgctggctccccgccaccagctgggcctcagccctcacggcattcctgctgagcaccgtggggcacccagggagcaggggcgtcagggatcctgctgccggcacccctgtgccgctggcatgagggccgtgtccccactgtgaaggatgaagagcaaggccctcaggacccgtgtcctcagagcaccacacactgagcacccagagacagcgggcctggcagcgggccgggccatgcagggagcgcctccctatgttgcctgccactctgggcaccggccagcaccctctggtgagaagaggtcccccctttttatgtgcactaccccaccatctgtgattataataaatttattattcctgtgtttgtcagttgttc

SEQ ID NO: 11024 - protein, 393 aa, Homo sapiens [sequence omitted]

SEQ ID NO: 11025 - DNA, 5362 bp, Homo sapiens
ttcatggccagagtgccccaggagaagcactgagttggtctacagaaatggatggtccaggggcctggctcctaggcagactgtgaggggatgcttggcatgcagggggttgactagggtgtgggaaatgtagcagggccttcagggttcccccagtgtgacaaggcatccctctttgctgagagtccctctaggggaggccagacgcccagggctggcaggcagctgttctccccatcaaagcagccatctgtgctccaccccaggaaggtgtgggtgttttacatatgcttatccctgatgcctgggtggtgtggtttcatccctagagtttacggatgaagacagtggtgtccctggtgcagacactggggtgattgatcttatttgtgtcgtggccagcaaggcctggggagcagagcaacagccttgctttgcatacacacagggcctcagaggactcaggtgcacacctgcatggcagaaccaggctctgggcccaggtgtctgacactgagtagctcgcctctcccaggggcgctggtgtgggccgatgcaagtgccaccatgggtgtgtgtgtggctccctgggccacctcactccaattaagcaggtccaggtgggacagcctgggaccagccctgcagcagcatgtgttaaccacaacagatggctgtagccaccaggcttgtccttggtgcagtcagcctgggggctgcgggggcttgtggaagcatgtgggaagacggtcccactggtcagcagagcagggtcctcaccgacccacagaggagcatgtcacaggacaggcaggcgtgtcagggaaggccaggctagtgccagccaagggcattgcctcccagactgcccttttcctcacactcccacgacacagccctcaaagcctgtgcccctgtgggtccctggccaaggagcaagggctgccctgcctgggccccccccgccagccccttggtcacctcatgctgtgtgccaggctgggggagtgtgcctgtgtgtatgtccaggtggcatttggatgaagacacaggtgtgtggtgaggctgtgcgggaggatgggcctatgcgtgcggtgggcaggtggtgtggaggcaggcgggcgggcgtgtggcagcgcgccggctgagcccctccacttccaggtcagccagagcagcctccccatgctgtcctcgccgtcaccgggccagcaggtgcagaccccgcagtcgatgccccctcccccccagccgtccccgcagcccggccagcccagctcacagcccaactccaacgtcaggtaggcctggcctggggtgcccctccccacctggccctcgaggctggccctgcctggaccccggctcacatgtttctctcacttggctgcagctctggccctgccccatctcccagtagcttcctgcccagcccctcaccgcagccctcccagagcccagtgacggcgcggaccccacagaacttcagtgtcccctcacctggacctttaaacacacctggtaagttgggcctgaggtgctaaggtcactcctcacctttatgaggcctcagctcatactgggtgtgcgagctctggggccctcagagctcaagttccccacccgagggtcgagggctgtggcctcacccgcctgtgtcctgcagtgaaccccagctctgtcatgagcccagctggctccagccaggctgaggagcagcagtacctggacaagctgaagcagctgtcgaagtacatcgagcccctgcgccgcatgatcaacaagatcgacaagaacgaagacagaaaaaaggacctgagtaagatgaagagccttctggacattctgacagacccctcgaagcggtgagctttgcccacagcccacggagggtccacaagggcacagatagcccagccatggatgggcacttggtgatgatgtgggtttaacaaaggcaccaggcagctctttggaccctggccagaggcctccaaggctccactctggtgtgtgctggggcttcaagcccaggcttcatcttggcccatgcccagcctttgccctattcctggctgctgctgtggccctcatgctgggccatcacagccagacctcatccagtcagcagccaggggcccagcttgcagtggcctgaccatcagctggcccagatgggcctgagcctgacctggagttctgcccctgacttgctggtgaccatgggcaggcgactgcatctcagttaccccatttgtagcccacgtgtgttgtcatgaaaatgaaacaaggtggcgctggtgagaagcaggtggaaggcagggctgctggccacaggctgctgtgaggatcagagctcgggcagtacctccaaactgcatgggcattggcatatacctccctttcacctcaactcaggctatcccccaacccctgtctagaagggtctctctgttctgcttgtctggatagaatgccagtcactattgggtggtcctccaggtcttcatgggttgatcctttgttagggttatagggatgagtggggcagggactggcctacatgacaatgaggcattcacagcctgatcaggggcctggccactgtcccttctcttgacccatcacctcactctgccaaccagggacaagcagctcctggggttgagggctgcctgccttcaactctgggtctgggaacagctggtcaactggtaggagctcctgcagaggtttctgatggctgaggcccagtggcagtagttgggatcctgagcctgagaactgccatgtcttccactctttcagcccaagtcctctctctctgcaggtgtcccctgaagaccttgcaaaagtgtgagatcgccctggagaaactcaagaatgacatggcggtggtgagtgggatgccagacacccctaggggaaccagggctctcctaagagctcctgggagtgctgctgagagggccttcaaggtcagggcatctgggcgggggccgggcctgaccttggaccctgcccacgaggcttcctggccaggtctgctgtgctgggtgggaacatgggagaagtcaccctctgtctacggcccccgtgggtgcctccttcacccatttcagaggaggcagggactgtagggaggataggctgtgggggtgggggattattcccaggatcagccaacattgtctgcacaagggtggaggctgtgagagaggcctcgggaatctgactgtgagtgaccatgggcctggggtgtgaaggccccctaaatggggaaccctcgggtcccgggctgctgaccgtgcccatcctgtctccagcccactcccccaccgcccccggtgccaccgaccaaacagcagtacctatgccagccgctcctggatgccgtcctggccaacatccgctcacctgtcttcaaccattccctgtaccgcacattcgttccagccatgaccgccattcacggcccacccatcacgtatgtccagctgggctgggctttgcggagggcggccagccctgggccgcgtgtgccaggtgtggtcaccatgccgcctccccagggccccagtggtgtgcacccggaagcgcaggcttgaggatgatgagcggcagagcatccccagtgtgctccagggtgaggtggccaggctggaccccaagttcctggtaaacctggacccttctcactgcagcaacaatggcactgtccacctgatctgcaagctgggtgagtgtccagagggccgggactggtgtgggaaagcaggccctgaccgcagccccaggactctgccatccaagccagatggcacagcgcccagaacccaccctgtgttcacgccccgccaggctgtctgctctatcctcacacacaccgggctccagacagcctggccatgcctcagtccccactgccagagcccgcacactctcacctccccaacacagatgtggctttgcttgcctgggccctagggaggtggtaggcaggacctctgggcacccatcaatgcagagcactccaggcttcacgtttggaaatctgagagtcagagagacctcctccaggctttgccacaagcttcaccagaacctccctgggtgtggagtcctgttccagagcagggctgtgaggcagggcaggccggggcttgtccaggtcacagatagagccttctgtgttgcagatgacaaggacctcccaagtgtgccaccactggagctcagtgtgcccgctgactatcctgcccaaagcccgctgtggatagaccggcagtggcagtacgacgccaaccccttcctccagtcggtgcaccgctgcatgacctccaggctgctgcagctcccggacaagcactcggtcaccgccttgctcaacacctgggcccagagcgtccaccaggcctgcctctcagccgcctagccaagactgcagggatggcccgcagcctcatcggggccaaggacacacgcctcctgtcagacacttctaggtgttggcttccttagagagcctggggttaggttagctttcctgcttttatcttctgccttggggacctgccaaacgaaatcccacacctgtacagaactgggataggcgcagtggagcgggttgcttggggggcgttggccgacttcttagagaaggccctccatgtgacttcctcccaggagccagatgcgatcctcaggctgctctcaccgtggcctgtccacggtccaggtccatctcagcagcgtgagggtgcactcagggtgttgttagagcgtctcgtgtgtgctagacgcacccctactcgttcctatagaacacagaggacataggaaacccttaaaacacacatgggattctctggtcacagttttgggttcaggctatgctgctttgggcaggtggagcaccccccgaggaagcctgcaagtccagggcacaggctgccttttggagggagggctggcccataggtgctgctggctccccgccaccagctgggcctcagccctcacggcattcctgctgagcaccgtggggcacccagggagcaggggcgtcagggatcctgctgccggcacccctgtgccgctggcatgagggccgtgtccccactgtgaaggatgaagagcaaggccctcaggacccgtgtcctcagagcaccacacactgagcacccagagacagcgggcctggcagcgggccgggccatgcagggagcgcctccctatgttgcctgccactctgggcaccggccagcaccctctggtgagaagaggtcccccctttttatgtgcactaccccaccatctgtgattataataaatttattattcctgtgtttgtcagttgttc

SEQ ID NO: 11026 - protein, 205 aa, Homo sapiens
MAQRPEPTLCSRPARLSALSSHTPGSRQPGHASVPTARARTLSPPQHRCGFACLGPREVVGRTSGHPSMQSTPGFTFGNLRVRETSSRLCHKLHQNLPGCGVLFQSRAVRQGRPGLVQVTDRAFCVADDKDLPSVPPLELSVPADYPAQSPLWIDRQWQYDANPFLQSVHRCMTSRLLQLPDKHSVTALLNTWAQSVHQACLSAA

SEQ ID NO: 11027 - DNA, 1453 bp, Homo sapiens
tggcctgggcactgcctgggggaagtatgctgcctggatgctcagacccacctgggcaggtcatttctggctactgtaatgactttcagagacagggaagcagaggcctctaacgccagggctttctgttgggtgggcagccagcacagggacaggcagatgatggcactccccgatgatcctgtccccacacctgcgaaagcccaccacacttcagcagtgtaagtggtcatccaccagctgtggaataccaaccttctgcaggcccaagagctgcagcacctcaagtccctcctggaagggaggcagaggccccaggcagccccaaggctgacagcatcctgacaggacagcgagcccagattcatggagaaggggacacagtgatgaacaactgacaaacacaggaataataaatttattataatcacagatggtggggtagtgcacataaaaaggggggacctcttctcaccagagggtgctggccggtgcccagagtggcaggcaacatagggaggcgctccctgcatggcccggcccgctgccaggcccgctgtctctgggtgctcagtgtgtggtgctctgaggacacgggtcctgagggccttgctcttcatccttcacagtggggacacggccctcatgccagcggcacaggggtgccggcagcaggatccctgacgcccctgctccctgggtgccccacggtgctcagcaggaatgccgtgagggctgaggcccagctggtggcggggagccagcagcacctatgggccagccctccctccaaaaggcagcctgtgccctggacttgcaggcttcctcggggggtgctccacctgcccaaagcagcatagcctgaacccaaaactgtgaccagagaatcccatgtgtgttttaagggtttcctatgtcctctgtgttctataggaacgagtaggggtgcgtctagcacacacgagacgctctaacaacaccctgagtgcaccctcacgctgctgagatggacctggaccgtggacaggccacggtgagagcagcctgaggatcgcatctggctcctgggaggaagtcacatggagggccttctctaagaagtcggccaacgccccccaagcaacccgctccactgcgcctatcccagttctgtacaggtgtgggatttcgtttggcaggtccccaaggcagaagataaaagcaggaaagctaacctaaccccaggctctctaaggaagccaacacctagaagtgtctgacaggaggcgtgtgtccttggccccgatgaggctgcgggccatccctgcagtcttggctaggcggctgagaggcaggcctggtggacgctctgggcccaggtgttgagcaaggcggtgaccgagtgcttgtccgggagctgcagcagcctggaggtcatgcagcggtgcaccgactggaggaaggggttggcgtc

SEQ ID NO: 11028 - protein, 52 aa, Homo sapiens
MILSPHLRKPTTLQQCKWSSTSCGIPTFCRPKSCSTSSPSWKGGRGPRQPQG

SEQ ID NO: 11029 - DNA, 724 bp, Homo sapiens
ctatgtttctgtgaccacaaatagcatctttggcaagtctagtttcagttggtctttgtccagctcctggattcctccatgcagggcctgagaagccctgagggataaaagattaatccggttcagtggactctgtggttcctcaactccaagtgcccccagcataagtcggacctgcctctcacgcaatggatcccctggcggcaacccgagaccggttctcctacccgcattccgccaagtctctcgctctgcccaggacgcacagatgagagcgctccgaagactgattcagggcaggatcctgctcctgaccatctgcgctgccggcattggtgggacttttcagtttggctataacctctctatcatcaatgccccgaccttgcacattcaggaattcaccaatgagacatggcaggcgcgtactggagagccactgcccgatcacctagtcctgcttatgtggtccctcatcgtgtctctgtatcccctgggaggcctctttggagcactgcttgcaggtcccttggccatcacgctgggaaggcccacctctaaataccgttgcattggaaattaaatttcaacctgaattttggaagagacacaaaccttcaaaccatagcaccagcactggatcagcaagactggattagaccactgggctcatatctgcaccgtggggagtaggggaacagtcgcaaacaaaagtggggctctt

SEQ ID NO: 11030 - protein, 104 aa, Homo sapiens
MRALRRLIQGRILLLTICAAGIGGTFQFGYNLSIINAPTLHIQEFTNETWQARTGEPLPDHLVLLMWSLIVSLYPLGGLFGALLAGPLAITLGRPTSKYRCIGN

SEQ ID NO: 11031 - DNA, 2953 bp, Homo sapiens
ctatgtttctgtgaccacaaatagcatctttggcaagtctagtttcagttggtctttgtccagctcctggattcctccatgcagggcctgagaagccctgagggataaaagattaatccggttcagtggactctgtggttcctcaactccaagtgcccccagcataagtcggacctgcctctcacgcaatggatcccctggcggcaacccgagaccggttctcctacccgcattccgccaagtctctcgctctgcccaggacgcacagatgagagcgctccgaagactgattcagggcaggatcctgctcctgaccatctgcgctgccggcattggtgggacttttcagtttggctataacctctctatcatcaatgccccgaccttgcacattcaggaattcaccaatgagacatggcaggcgcgtactggagagccactgcccgatcacctagtcctgcttatgtggtccctcatcgtgtctctgtatcccctgggaggcctctttggagcactgcttgcaggtcccttggccatcacgctgggaaggaagaagtccctcctggtgaataacatctttgtggtgtcagcagcaatcctgtttggattcagccgcaaagcaggctcctttgagatgatcatgctgggaagactgctcgtgggagtcaatgcaggtgtgagcatgaacatccagcccatgtacctgggggagagcgcccctaaggagctccgaggagctgtggccatgagctcagccatctttacggctctggggatcgtgatgggacaggtggtcggactcagcactacggcggctccggggctccggggacttggcaggggagctggaggagctggaggaggagcgcgctgcctgccagggctgccgtgcccggcgcccatgggagctgttccagcatcgggccctgaggagacaggtgacaagcctcgtggttctgggcagtgccatggagctctgcgggaatgactcggtgtacgcctacgcctcctccgtgttccggaaggcaggagtgccggaagcgaagatccagtacgcgatcatcgggactgggagctgcgagctgctcacggcggttgttagttgtgtggtaatcgagagggtgggtcggcgcgtgctgctcatcggtgggtacagcctgatgacctgctgggggagcatcttcactgtggccctgtgcctgcaggtagctggggtggatgagggctggggggtccaggccgggctgacttccacctcacccccgccccgtccacggcagagctccttcccctggacactctacctggccatggcctgcatctttgccttcatcctcagctttggcattggccctggtgagtgggcccaaggggctctgggcatccatcatcacatagaaggagtgatgggtgcctgggtgcacagtgggtgggtgtgaatgcaatgtcccctgcaggccctcagagaccacctcatgccggggcttctgggagggaatggcaggaggagagcactgaggggccccccatacagactgggcctgggctcccactcccatgtctgggctggggtcggggagaggcaggcagggaaccctggccagcagccccctgtccctgcccctccttctagccggagtgacggggatcctggccacagagctgtttgaccagatggccaggcctgctgcctgcatggtctgcggggcgctcatgtggatcatgctcatcctggtcggcctgggatttccctttatcatggaggccttgtcccacttcctctatgtccctttccttggtgtctgtgtctgtggggccatctacactggcctgttccttcctgagaccaaaggcaagaccttccaagagatctccaaggaattacacagactcaacttccccaggcgggcccagggccccacgtggaggagcctggaggttatccagtcaacagaactctagtcccaaaggggtggccagagccaaagccagctactgtcctgtcctctgcttcctgccagggccctggtcctcactccctcctgcattcctcatttaaggagtgtttattgagcaccctttgtgtgcagacatggctccaggtgcttagcaatcaatggtgagcgtggtattccaggctaaaggtaattaactgacagaaaatcagtaacaacataattacaggctggttgtggcagctcatgactgtaatcccagcactttgggaggccaaggtgggaggatcaattgaggccagagtttgaaaccagcctaggtaacatagtgagaccccctatctctacaaaaaattttaaacattagctgggcatggtggtatgtgctaacagctctagctactcaggaggctgaggcagcaggatcacttgagtccaagagttcaaggtagcagtaagctacaatcacaccactgcatgccagactgggtgacagagggagacttcatctctttaaaacataataataataattacagactcaggaaatgcagtgaaagaaaaatacaggttggccaggtgaggtggctgatgcctgtaatcccagcactttgggaggccaagatgggaagattgctttgagaccagaagtttgagaccagcctgggccacatagtaagatcctgtttctaccaaaaaaaaaaaaaaaaaaaattagctgggtgtggtggtacatgcctgtggtcccagctactcaggaggctgaaatgggaggatcacttgagcctgggaggtcgaggctgcagtgagtcctaattgagccactgcactccagcctggacaacagaaagagaccatgtttcaaaaaaaataaatacaggttgtagtgggtatgggtatgcataccaggaggcccgacctcgtctgagaggggagtggtcagaaaagaattttctgaggaattgatgtttttaatcaactttattgaggtataattt

SEQ ID NO: 11032 - protein, 239 aa, Homo sapiens [sequence omitted]

SEQ ID NO: 11033 - DNA, 2750 bp, Homo sapiens
ctatgtttctgtgaccacaaatagcatctttggcaagtctagtttcagttggtctttgtccagctcctggattcctccatgcagggcctgagaagccctgagggataaaagattaatccggttcagtggactctgtggttcctcaactccaagtgcccccagcataagtcggacctgcctctcacgcaatggatcccctggcggcaacccgagaccggttctcctacccgcattccgccaagtctctcgctctgcccaggacgcacagatgagagcgctccgaagactgattcagggcaggatcctgctcctgaccatctgcgctgccggcattggtgggacttttcagtttggctataacctctctatcatcaatgccccgaccttgcacattcaggaattcaccaatgagacatggcaggcgcgtactggagagccactgcccgatcacctagtcctgcttatgtggtccctcatcgtgtctctgtatcccctgggaggcctctttggagcactgcttgcaggtcccttggccatcacgctgggaaggaagaagtccctcctggtgaataacatctttgtggtgtcagcagcaatcctgtttggattcagccgcaaagcaggctcctttgagatgatcatgctgggaagactgctcgtgggagtcaatgcaggtgtgagcatgaacatccagcccatgtacctgggggagagcgcccctaaggagctccgaggagctgtggccatgagctcagccatctttacggctctggggatcgtgatgggacaggtggtcggactcagggagctcctaggtggccctcaggcctggcccctgctgctggccagctgcctggtgcccggggcgctccagctcgcctccctgcctctgctccctgaaagcccgcgctacctcctcattgactgtggagacaccgaggcctgcctggcagcactacggcggctccggggctccggggacttggcaggggagctggaggagctggaggaggagcgcgctgcctgccagggctgccgtgcccggcgcccatgggagctgttccagcatcgggccctgaggagacaggtgacaagcctcgtggttctgggcagtgccatggagctctgcgggaatgactcggtgtacgcctacgcctcctccgtgttccggaaggcaggagtgccggaagcgaagatccagtacgcgatcatcgggactgggagctgcgagctgctcacggcggttgttagttgtgtggtaatcgagagggtgggtcggcgcgtgctgctcatcggtgggtacagcctgatgacctgctgggggagcatcttcactgtggccctgtgcctgcagagctccttcccctggacactctacctggccatggcctgcatctttgccttcatcctcagctttggcattggccctgccggagtgacggggatcctggccacagagctgtttgaccagatggccaggcctgctgcctgcatggtctgcggggcgctcatgtggatcatgctcatcctggtcggcctgggatttccctttatcatggaggccttgtcccacttcctctatgtccctttccttggtgtctgtgtctgtggggccatctacactggcctgttccttcctgagaccaaaggcaagaccttccaagagatctccaaggaattacacagactcaacttccccaggcgggcccagggccccacgtggaggagcctggaggttatccagtcaacagaactctagtcccaaaggggtggccagagccaaagccagctactgtcctgtcctctgcttcctgccagggccctggtcctcactccctcctgcattcctcatttaaggagtgtttattgagcaccctttgtgtgcagacatggctccaggtgcttagcaatcaatggtgagcgtggtattccaggctaaaggtaattaactgacagaaaatcagtaacaacataattacaggctggttgtggcagctcatgactgtaatcccagcactttgggaggccaaggtgggaggatcaattgaggccagagtttgaaaccagcctaggtaacatagtgagaccccctatctctacaaaaaattttaaacattagctgggcatggtggtatgtgctaacagctctagctactcaggaggctgaggcagcaggatcacttgagtccaagagttcaaggtagcagtaagctacaatcacaccactgcatgccagactgggtgacagagggagacttcatctctttaaaacataataataataattacagactcaggaaatgcagtgaaagaaaaatacaggttggccaggtgaggtggctgatgcctgtaatcccagcactttgggaggccaagatgggaagattgctttgagaccagaagtttgagaccagcctgggccacatagtaagatcctgtttctaccaaaaaaaaaaaaaaaaaaaattagctgggtgtggtggtacatgcctgtggtcccagctactcaggaggctgaaatgggaggatcacttgagcctgggaggtcgaggctgcagtgagtcctaattgagccactgcactccagcctggacaacagaaagagaccatgtttcaaaaaaaataaatacaggttgtagtgggtatgggtatgcataccaggaggcccgacctcgtctgagaggggagtggtcagaaaagaattttctgaggaattgatgtttttaatcaactttattgaggtataattt

SEQ ID NO: 11034 - protein, 496 aa, Homo sapiens; identical to SEQ ID NO: 1710

SEQ ID NO: 11035 - DNA, 2601 bp, Homo sapiens
ctatgtttctgtgaccacaaatagcatctttggcaagtctagtttcagttggtctttgtccagctcctggattcctccatgcagggcctgagaagccctgagggataaaagattaatccggttcagtggactctgtggttcctcaactccaagtgcccccagcataagtcggacctgcctctcacgcaatggatcccctggcggcaacccgagaccggttctcctacccgcattccgccaagtctctcgctctgcccaggacgcacagatgagagcgctccgaagactgattcagggcaggatcctgctcctgaccatctgcgctgccggcattggtgggacttttcagtttggctataacctctctatcatcaatgccccgaccttgcacattcaggaattcaccaatgagacatggcaggcgcgtactggagagccactgcccgatcacctagtcctgcttatgtggtccctcatcgtgtctctgtatcccctgggaggcctctttggagcactgcttgcaggtcccttggccatcacgctgggaaggaagaagtccctcctggtgaataacatctttgtggtgtcagcagcaatcctgtttggattcagccgcaaagcaggctcctttgagatgatcatgctgggaagactgctcgtgggagtcaatgcaggtgtgagcatgaacatccagcccatgtacctgggggagagcgcccctaaggagctccgaggagctgtggccatgagctcagccatctttacggctctggggatcgtgatgggacaggtggtcggactcagcactacggcggctccggggctccggggacttggcaggggagctggaggagctggaggaggagcgcgctgcctgccagggctgccgtgcccggcgcccatgggagctgttccagcatcgggccctgaggagacaggtgacaagcctcgtggttctgggcagtgccatggagctctgcgggaatgactcggtgtacgcctacgcctcctccgtgttccggaaggcaggagtgccggaagcgaagatccagtacgcgatcatcgggactgggagctgcgagctgctcacggcggttgttagttgtgtggtaatcgagagggtgggtcggcgcgtgctgctcatcggtgggtacagcctgatgacctgctgggggagcatcttcactgtggccctgtgcctgcagagctccttcccctggacactctacctggccatggcctgcatctttgccttcatcctcagctttggcattggccctgccggagtgacggggatcctggccacagagctgtttgaccagatggccaggcctgctgcctgcatggtctgcggggcgctcatgtggatcatgctcatcctggtcggcctgggatttccctttatcatggaggccttgtcccacttcctctatgtccctttccttggtgtctgtgtctgtggggccatctacactggcctgttccttcctgagaccaaaggcaagaccttccaagagatctccaaggaattacacagactcaacttccccaggcgggcccagggccccacgtggaggagcctggaggttatccagtcaacagaactctagtcccaaaggggtggccagagccaaagccagctactgtcctgtcctctgcttcctgccagggccctggtcctcactccctcctgcattcctcatttaaggagtgtttattgagcaccctttgtgtgcagacatggctccaggtgcttagcaatcaatggtgagcgtggtattccaggctaaaggtaattaactgacagaaaatcagtaacaacataattacaggctggttgtggcagctcatgactgtaatcccagcactttgggaggccaaggtgggaggatcaattgaggccagagtttgaaaccagcctaggtaacatagtgagaccccctatctctacaaaaaattttaaacattagctgggcatggtggtatgtgctaacagctctagctactcaggaggctgaggcagcaggatcacttgagtccaagagttcaaggtagcagtaagctacaatcacaccactgcatgccagactgggtgacagagggagacttcatctctttaaaacataataataataattacagactcaggaaatgcagtgaaagaaaaatacaggttggccaggtgaggtggctgatgcctgtaatcccagcactttgggaggccaagatgggaagattgctttgagaccagaagtttgagaccagcctgggccacatagtaagatcctgtttctaccaaaaaaaaaaaaaaaaaaaattagctgggtgtggtggtacatgcctgtggtcccagctactcaggaggctgaaatgggaggatcacttgagcctgggaggtcgaggctgcagtgagtcctaattgagccactgcactccagcctggacaacagaaagagaccatgtttcaaaaaaaataaatacaggttgtagtgggtatgggtatgcataccaggaggcccgacctcgtctgagaggggagtggtcagaaaagaattttctgaggaattgatgtttttaatcaactttattgaggtataattt

SEQ ID NO: 11036 - protein, 239 aa, Homo sapiens [sequence omitted]

SEQ ID NO: 11037 - DNA, 1282 bp, Homo sapiens
ataagtcggacctgcctctcacgcaatggatcccctggcggcaacccgagaccggttctcctacccgcattccgccaagtctctcgctctgcccaggacgcacagatgagagcgctccgaagactgagatgagcttggggcttagccgagtaaggagtgagcggcttttcagcctcagtgctgcggcagaggcggatggaggatgaactggagccgtccttacggcctcggacgcagattcagggcaggatcctgctcctgaccatctgcgctgccggcattggtgggacttttcagtttggctataacctctctatcatcaatgccccgaccttgcacattcaggaattcaccaatgagacatggcaggcgcgtactggagagccactgcccgatcacctagtcctgcttatgtggtccctcatcgtgtctctgtatcccctgggaggcctctttggagcactgcttgcaggtcccttggccatcacgctgggaaggaagaagtccctcctggtgaataacatctttgtggtgtcagcagcaatcctgtttggattcagccgcaaagcaggctcctttgagatgatcatgctgggaagactgctcgtgggagtcaatgcaggtgtgagcatgaacatccagcccatgtacctgggggagagcgcccctaaggagctccgaggagctgtggccatgagctcagccatctttacggctctggggatcgtgatgggacaggtggtcggactcagggagctcctaggtggccctcaggcctggcccctgctgctggccagctgcctggtgcccggggcgctccagctcgcctccctgcctctgctccctgaaagcccgcgctacctcctcattgactgtggagacaccgaggcctgcctggcagcactacggcggctccggggctccggggacttggcaggggagctggaggagctggaggaggagcgcgctgcctgccagggctgccgtgcccggcgcccatgggagctgttccagcatcgggccctgaggagacaggtgacaagcctcgtggttctgggcagtgccatggagctctgcgggaatgactcggtgtacgcctacgcctcctccgtgttccggaaggcaggagtgccggaagcgaagatccagtacgcgatcatcgggactgggagctgcgagctgctcacggcggttgttagtgtgagtctggagggtgcccttcctccaccagccctgtggggagggacccccaggtcctctgcattaaaccagtttacactcc

SEQ ID NO: 11038 - protein, 361 aa, Homo sapiens
MEDELEPSLRPRTQIQGRILLLTICAAGIGGTFQFGYNLSIINAPTLHIQEFTNETWQARTGEPLPDHLVLLMWSLIVSLYPLGGLFGALLAGPLAITLGRKKSLLVNNIFVVSAAILFGFSRKAGSFEMIMLGRLLVGVNAGVSMNIQPMYLGESAPKELRGAVAMSSAIFTALGIVMGQVVGLRELLGGPQAWPLLLASCLVPGALQLASLPLLPESPRYLLIDCGDTEACLAALRRLRGSGDLAGELEELEEERAACQGCRARRPWELFQHRALRRQVTSLVVLGSAMELCGNDSVYAYASSVFRKAGVPEAKIQYAIIGTGSCELLTAVVSVSLEGALPPPALWGGTPRSSALNQFT

SEQ ID NO: 11039 - DNA, 2698 bp, Homo sapiens
ataagtcggacctgcctctcacgcaatggatcccctggcggcaacccgagaccggttctcctacccgcattccgccaagtctctcgctctgcccaggacgcacagatgagagcgctccgaagactgagatgagcttggggcttagccgagtaaggagtgagcggcttttcagcctcagtgctgcggcagaggcggatggaggatgaactggagccgtccttacggcctcggacgcagattcagggcaggatcctgctcctgaccatctgcgctgccggcattggtgggacttttcagtttggctataacctctctatcatcaatgccccgaccttgcacattcaggaattcaccaatgagacatggcaggcgcgtactggagagccactgcccgatcacctagtcctgcttatgtggtccctcatcgtgtctctgtatcccctgggaggcctctttggagcactgcttgcaggtcccttggccatcacgctgggaaggaagaagtccctcctggtgaataacatctttgtggtgtcagcagcaatcctgtttggattcagccgcaaagcaggctcctttgagatgatcatgctgggaagactgctcgtgggagtcaatgcaggtgtgagcatgaacatccagcccatgtacctgggggagagcgcccctaaggagctccgaggagctgtggccatgagctcagccatctttacggctctggggatcgtgatgggacaggtggtcggactcagggagctcctaggtggccctcaggcctggcccctgctgctggccagctgcctggtgcccggggcgctccagctcgcctccctgcctctgctccctgaaagcccgcgctacctcctcattgactgtggagacaccgaggcctgcctggcagcactacggcggctccggggctccggggacttggcaggggagctggaggagctggaggaggagcgcgctgcctgccagggctgccgtgcccggcgcccatgggagctgttccagcatcgggccctgaggagacaggtgacaagcctcgtggttctgggcagtgccatggagctctgcgggaatgactcggtgtacgcctacgcctcctccgtgttccggaaggcaggagtgccggaagcgaagatccagtacgcgatcatcgggactgggagctgcgagctgctcacggcggttgttagttgtgtggtaatcgagagggtgggtcggcgcgtgctgctcatcggtgggtacagcctgatgacctgctgggggagcatcttcactgtggccctgtgcctgcagagctccttcccctggacactctacctggccatggcctgcatctttgccttcatcctcagctttggcattggccctgccggagtgacggggatcctggccacagagctgtttgaccagatggccaggcctgctgcctgcatggtctgcggggcgctcatgtggatcatgctcatcctggtcggcctgggatttccctttatcatggaggccttgtcccacttcctctatgtccctttccttggtgtctgtgtctgtggggccatctacactggcctgttccttcctgagaccaaaggcaagaccttccaagagatctccaaggaattacacagactcaacttccccaggcgggcccagggccccacgtggaggagcctggaggttatccagtcaacagaactctagtcccaaaggggtggccagagccaaagccagctactgtcctgtcctctgcttcctgccagggccctggtcctcactccctcctgcattcctcatttaaggagtgtttattgagcaccctttgtgtgcagacatggctccaggtgcttagcaatcaatggtgagcgtggtattccaggctaaaggtaattaactgacagaaaatcagtaacaacataattacaggctggttgtggcagctcatgactgtaatcccagcactttgggaggccaaggtgggaggatcaattgaggccagagtttgaaaccagcctaggtaacatagtgagaccccctatctctacaaaaaattttaaacattagctgggcatggtggtatgtgctaacagctctagctactcaggaggctgaggcagcaggatcacttgagtccaagagttcaaggtagcagtaagctacaatcacaccactgcatgccagactgggtgacagagggagacttcatctctttaaaacataataataataattacagactcaggaaatgcagtgaaagaaaaatacaggttggccaggtgaggtggctgatgcctgtaatcccagcactttgggaggccaagatgggaagattgctttgagaccagaagtttgagaccagcctgggccacatagtaagatcctgtttctaccaaaaaaaaaaaaaaaaaaaattagctgggtgtggtggtacatgcctgtggtcccagctactcaggaggctgaaatgggaggatcacttgagcctgggaggtcgaggctgcagtgagtcctaattgagccactgcactccagcctggacaacagaaagagaccatgtttcaaaaaaaataaatacaggttgtagtgggtatgggtatgcataccaggaggcccgacctcgtctgagaggggagtggtcagaaaagaattttctgaggaattgatgtttttaatcaactttattgaggtataattt

SEQ ID NO: 11040 - protein, 503 aa, Homo sapiens
MEDELEPSLRPRTQIQGRILLLTICAAGIGGTFQFGYNLSIINAPTLHIQEFTNETWQARTGEPLPDHLVLLMWSLIVSLYPLGGLFGALLAGPLAITLGRKKSLLVNNIFVVSAAILFGFSRKAGSFEMIMLGRLLVGVNAGVSMNIQPMYLGESAPKELRGAVAMSSAIFTALGIVMGQVVGLRELLGGPQAWPLLLASCLVPGALQLASLPLLPESPRYLLIDCGDTEACLAALRRLRGSGDLAGELEELEEERAACQGCRARRPWELFQHRALRRQVTSLVVLGSAMELCGNDSVYAYASSVFRKAGVPEAKIQYAIIGTGSCELLTAVVSCVVIERVGRRVLLIGGYSLMTCWGSIFTVALCLQSSFPWTLYLAMACIFAFILSFGIGPAGVTGILATELFDQMARPAACMVCGALMWIMLILVGLGFPFIMEALSHFLYVPFLGVCVCGAIYTGLFLPETKGKTFQEISKELHRLNFPRRAQGPTWRSLEVIQSTEL

SEQ ID NO: 11041 - DNA, 624 bp, Homo sapiens
gacgcacagatgagagcgctccgaagactgagatgagcttggggcttagccgagtaaggagtgagcggcttttcagcctcagtgctgcggcagaggcggatggaggatgaactggagccgtccttacggcctcggacgcagattcagggcaggatcctgctcctgaccatctgcgctgccggcattggtgggacttttcagtttggctataacctctctatcatcaatgccccgaccttggagacctgcaaatgacatttcatctctaaccaagagaagggtgtccatgtcttcctcatgtctttcctaaccatgtggcttcccttcactcacctgaggtttggagtctggggagtccaaactacctggtacaactctgacctgtggctaacgctgtgagcaagtcatttcacctctccctgagcctaatccccagtcttgacagtgaccaaggctgggcatggttgctcatgtctgtaatcccggtgctttgggaggctgaagcaggaggattgcttgaggccaggaattggagaacagcctgggcaacatagtgagaccctgtctctacaaaaaaatttaaaaattagcctggcatgctggtatgtgcctgttagtttcagc

SEQ ID NO: 11042 - protein, 51 aa, Homo sapiens
MEDELEPSLRPRTQIQGRILLLTICAAGIGGTFQFGYNLSIINAPTLETCK

SEQ ID NO: 11043 - DNA, 418 bp, Homo sapiens
cagagtcgcttgctggcacttgcgagggcgaatgcaggggcttggccgagatgaccttggaccagagctcccttccggcctgcagagatgagcttggggcttagccgagtaaggagtgagcggcttttcagcctcagtgctgcggcagaggcggatggaggatgaactggagccgtccttacggcctcggacgcagattcagggcaggatcctgctcctgaccatctgcgctgccggcattggtgggacttttcagtttggctataacctctctatcatcaatgccccgaccttggtatgtatcctctctgggtggagactgtccctgtctgagtgggtactggctaacagctgcccactgaggggcttcagccaggcatccactaggtggcactttctgccacaagtttgtctccat

SEQ ID NO: 11044 - protein, 87 aa, Homo sapiens
MEDELEPSLRPRTQIQGRILLLTICAAGIGGTFQFGYNLSIINAPTLVCILSGWRLSLSEWVLANSCPLRGFSQASTRWHFLPQVCL

SEQ ID NO: 11045 - DNA, 2636 bp, Homo sapiens
cactgcgcgtgcgctagcgcctctttcaccactgggcgctgcgcgctgcccttccctccgcgcacaggctgccggctcaccgcttgctaatggcagccggggtctccctgggacagcaagacctccgctcaggcccctctttcgaatgctccacgccctcctgcgatctagaatgattcagggcaggatcctgctcctgaccatctgcgctgccggcattggtgggacttttcagtttggctataacctctctatcatcaatgccccgaccttgcacattcaggaattcaccaatgagacatggcaggcgcgtactggagagccactgcccgatcacctagtcctgcttatgtggtccctcatcgtgtctctgtatcccctgggaggcctctttggagcactgcttgcaggtcccttggccatcacgctgggaaggaagaagtccctcctggtgaataacatctttgtggtgtcagcagcaatcctgtttggattcagccgcaaagcaggctcctttgagatgatcatgctgggaagactgctcgtgggagtcaatgcaggtgtgagcatgaacatccagcccatgtacctgggggagagcgcccctaaggagctccgaggagctgtggccatgagctcagccatctttacggctctggggatcgtgatgggacaggtggtcggactcagggagctcctaggtggccctcaggcctggcccctgctgctggccagctgcctggtgcccggggcgctccagctcgcctccctgcctctgctccctgaaagcccgcgctacctcctcattgactgtggagacaccgaggcctgcctggcagcactacggcggctccggggctccggggacttggcaggggagctggaggagctggaggaggagcgcgctgcctgccagggctgccgtgcccggcgcccatgggagctgttccagcatcgggccctgaggagacaggtgacaagcctcgtggttctgggcagtgccatggagctctgcgggaatgactcggtgtacgcctacgcctcctccgtgttccggaaggcaggagtgccggaagcgaagatccagtacgcgatcatcgggactgggagctgcgagctgctcacggcggttgttagttgtgtggtaatcgagagggtgggtcggcgcgtgctgctcatcggtgggtacagcctgatgacctgctgggggagcatcttcactgtggccctgtgcctgcagagctccttcccctggacactctacctggccatggcctgcatctttgccttcatcctcagctttggcattggccctgccggagtgacggggatcctggccacagagctgtttgaccagatggccaggcctgctgcctgcatggtctgcggggcgctcatgtggatcatgctcatcctggtcggcctgggatttccctttatcatggaggccttgtcccacttcctctatgtccctttccttggtgtctgtgtctgtggggccatctacactggcctgttccttcctgagaccaaaggcaagaccttccaagagatctccaaggaattacacagactcaacttccccaggcgggcccagggccccacgtggaggagcctggaggttatccagtcaacagaactctagtcccaaaggggtggccagagccaaagccagctactgtcctgtcctctgcttcctgccagggccctggtcctcactccctcctgcattcctcatttaaggagtgtttattgagcaccctttgtgtgcagacatggctccaggtgcttagcaatcaatggtgagcgtggtattccaggctaaaggtaattaactgacagaaaatcagtaacaacataattacaggctggttgtggcagctcatgactgtaatcccagcactttgggaggccaaggtgggaggatcaattgaggccagagtttgaaaccagcctaggtaacatagtgagaccccctatctctacaaaaaattttaaacattagctgggcatggtggtatgtgctaacagctctagctactcaggaggctgaggcagcaggatcacttgagtccaagagttcaaggtagcagtaagctacaatcacaccactgcatgccagactgggtgacagagggagacttcatctctttaaaacataataataataattacagactcaggaaatgcagtgaaagaaaaatacaggttggccaggtgaggtggctgatgcctgtaatcccagcactttgggaggccaagatgggaagattgctttgagaccagaagtttgagaccagcctgggccacatagtaagatcctgtttctaccaaaaaaaaaaaaaaaaaaaattagctgggtgtggtggtacatgcctgtggtcccagctactcaggaggctgaaatgggaggatcacttgagcctgggaggtcgaggctgcagtgagtcctaattgagccactgcactccagcctggacaacagaaagagaccatgtttcaaaaaaaataaatacaggttgtagtgggtatgggtatgcataccaggaggcccgacctcgtctgagaggggagtggtcagaaaagaattttctgaggaattgatgtttttaatcaactttattgaggtataattt

SEQ ID NO: 11046 - protein, 499 aa, Homo sapiens; identical to SEQ ID NO: 1712

SEQ ID NO: 11047 - DNA, 816 bp, Homo sapiens
ctctttcaccactgggcgctgcgcgctgcccttccctccgcgcacaggctgccggctcaccgcttgctaatggcagccggggtctccctgggacagcaagacctccgctcaggcccctctttcgaatgctccacgccctcctgcgatctagaatgattcagggcaggatcctgctcctgaccatctgcgctgccggcattggtgggacttttcagtttggctataacctctctatcatcaatgccccgaccttgcacattcaggaattcaccaatgagacatggcaggcgcgtactggagagccactgcccgatcacctagtcctgcttatgtggtccctcatcgtgtctctgtatcccctgggaggcctctttggagcactgcttgcaggtcccttggccatcacgctgggaaggtaagtgcttcctgcataccccctgaatgccctttaatgaggagcgctgcagcctgcaggctgaggaatgtggaagaaggaagaggcccggcaagctccaggcccagatcagctcctcatccagcctcttactctgcctggagtttcaccttgcaagacacgtcttcaagggtttggtagagcaaacagtcctgtgctacaagagagggaggactcctggtttctaatttcatgtctgccaacaagtgctaactgaccttaaacaagttattttcttcctgggcctcactctcctcctgcatatctaatgcagttcttggatttcaaagaatacaaactgactctgataacagaatcaaaaatgtaatagctggaaggatagtggggcagctcatagcatg

SEQ ID NO: 11048 - protein, 97 aa, Homo sapiens
MLHALLRSRMIQGRILLLTICAAGIGGTFQFGYNLSIINAPTLHIQEFTNETWQARTGEPLPDHLVLLMWSLIVSLYPLGGLFGALLAGPLAITLGR

SEQ ID NO: 11049 - DNA, 1669 bp, Homo sapiens
gtttgctgaattaatggtccctatcgtagctaatgtctgaatgcttaccatgaccaggcacggtataggcaatctccatgcatgatctcattgaattcaacgatttcctgtagtcttagagacctgtcaatatctcctgctacatgagctcagctgccatcaagcactgtgttcgctgcttccttcacatctgctgtcttaagggagctctcacttccatgcggcccccgtggagctgtaatttggcctcaatgggaccagatgccaggtttctcacctggcttcttcctaaggcttccagccttagagaaagttacttaggccttattggaactatgggcagccagggcccctgtcaccaacctgtctccagacctatggcaaggccttcagcaggattctgccctccagagccacttcctctgctcccccagcctccagtgcagtatctcactgaatggtgaaagcacagctgtctctttcccagctgtatcttgccccccagcacacttcctggctgagataaacattcagcatttttttttttttgagatggagtctcactctgttgcccaggcaggagggcagtggcgcgatctgggcttactgcaacctccgcctccctcccggattcaagcaattctgcctcagccttctgagtagctgggattacaggtgcccaccaccaagcccggctaatttttgtatttttagtagagacagggttttaccatgttggccaggctggtctcgaactcctgacctcaagtggtctgcccacctcggcctcccaaagtgcagggattgcaggtgtgggccacgacatccggccaacactcagtatttgactaataaatgaataaatagtccgtaggttctggaaacttcagaaaaccttagccaaacatccttctgtcatgaaaattgtatcaaagttttcaaaaataatacatttaattctacagaacaatttgccagaacaagaaaggcagtattttttgggggaagatatcaacgattcaatttttgtaaagtcaactactttgcaaatatctaggaaaatacctgagggaaggagttaattgttgtgcctttggaggagtggagaactttcagtatatactgaattttcaaaaatcttaacaaacgtgtcattttgtaattaaaaatcacaaaagagtgggctgggtatggtggctcacgcctgtaatcctaccactttgggaggccaaggcgagtgtatcgcttgagctcaggagtttgaaaccagcctgggcaatatggtgaaatcccatctctacaaaaaaattagcccagcatgatggtgtgtgcctgtagtcccagctccccagtagctgggtctacaggtgcccgccaccacgcctggctaattttttgtatttttagtagaggcgggatttcaccgtgttagccaggatggtctcaatctcctgacctcgtgatccgcccgcctcggcctcccaaagtgctgggattacaggcatgagccactgcgcccggccaatttttgtgtttttagtagagatggggtttcaccatcttggccaggttggtcttaaacttctgacattgtgatccacccgcctcggcctcccaaagtgctgggattacaggtgtgagccactgcgccaggccaagactcagtctc

SEQ ID NO: 11050 - protein, 37 aa, Homo sapiens
MMVCACSPSSPVAGSTGARHHAWLIFCIFSRGGISPC

SEQ ID NO: 11051 - DNA, 3383 bp, Homo sapiens
attcgaggttttttcatgtgtcaacaaaccacgctcacaattatttttgagacaggcttctctcccaaggcctaattgctggtatttagggtatgtcaggctaccgtgaatcaacgccctcaagcctcctaaatgcccccttttctagttgtgagggtctgtgaggcactgctttaagctatacccttgatttgatctttactatgagtccatggcttcctggcagtgctctggatttgatctttgctcacaggctgttacttaatttgggattcttttgctagctggagaggatagaggcgagaaaacattttttgttgttgttttcaactaacccagtgtttctgaaatatgctacgtttaattaaattttgttgcctctgaattctgcttgcaaactggccagttattttctgagctaattcttcatgtcttacagcaagcttagaatatgcatctaacagcaaccagttcatgctttcaacatttggagttttctttgctcaagtccataagttcactgagcccattttctttcttccgtgttactgcactatataacatagcttttcatttctccagcctcatcgccgtcctctgcctcgtcttggaactgataccatatttcacaggtctttgttacggtagcaccaactcctggtgccaatttattgatcagctttctattgctgactaatagatgatcataacatctcggtggtaaagaaacaaaaaaagcaattatttagcctaagcctctaagtcctctgggctgggctgatctaggatggttctggctgatggctctgctgatcttggtcattcctgcaactgcagctcagctgggcattggctggctgatctagaatagtcccagtgagggtggcttagctgggcccctttggctgtccatgtcttgtcatcctcctggctagcctggaatgttctcatgaaggcagaagagcaagtagaagtgagcaaggcctcttaaggcttaggctggaacatggtacgccctcactgcagcctcatcctattggccgagcccagagccaggagcagggatgtaggcagtacttgcccctttagtgggaggaactgcaaaatcacacagcaagcagtgtgggtgcagggaggggtgaagaattgggtttgataatgtgctgcaatagtcatgtcctgtctgatatgtccgcagaaccctgcgtttctttctaaagccttttttcatccatggtggcaacaccgcaacagccctgagaaatgtcagggcaaggaagatcatctccatctgaccagggaggcaaacagagacagagagattgagagagacagaggcagagagagagaaacacacacacacacagacagacacagagacagagagattgagagagacagaggcagagagagagagaaacacacacacacacagacacagagacagagagattgagagagacagaggcagagagagagaaacacacacacacacagacacagagacagagagattgagagagacagaggcagagagagagagaaacacacacacacacacacacacagagacagagagattgagagagacagaggcagagagagagagaaacacacacacagacacagagacagagagattgagaggcagagagagaaacacacacacacacagagacacacacagagacagagagattgagaaagacaggcagagagagagagaaacacacacacacagacacagagacagagagattgagagagacagaggcagagagagagagaaacacacacacacacacagacacagagacagagagattgagaggcagagagagaaacacacacacacacagagacacacacagagacagagagattgagagagacagaggcagagagagagacacacacacacacagacagactcagagacagagagtgagccaagaaggaaaggaatggtgggatggaggggggcgtccctgtagggggaccaaagaggggcttggggacggggagctcagtaccctcctccctggctcagcactacggcggctccggggctccggggacttggcaggggagctggaggagctggaggaggagcgcgctgcctgccagggctgccgtgcccggcgcccatgggagctgttccagcatcgggccctgaggagacaggtgacaagcctcgtggttctgggcagtgccatggagctctgcgggaatgactcggtgtacgcctacgcctcctccgtgttccggaaggcaggagtgccggaagcgaagatccagtacgcgatcatcgggactgggagctgcgagctgctcacggcggttgttagtgtgagtctggagggtgcccttcctccaccagccctgtggggagggacccccaggtcctctgcattaaaccagtttacactccagcttatggtgttaaaatgcagtgaggggccaggtgcggtggctcatgcctgtaagcccagcactttgggaggccgaggtgggtggatcacaaggtcaggagttcgagaccagcctggccaacacagtgaaacccccgtctctactaaaaaatacaaaaaattatcccggcgtggtggcgggcgcctgtaatcccaggtacttgggaggctgaggcaggagaatcgcatgaacccagtaggtggaggttgcagtgagccgagatggtgccattgcactccagcccaggcaatagtgctgaggtgggatcaggagttggagaccagcctgggcaacatggtgaaaccccgtctctacaaaaaatacaaaaattagccaggcgtggtggtcttcgcctgtagtgctagctactggcgaggctgaggtgggaggatcacttgagcctaggaggttgagactgcagtaaaccgagattgtgccactgcactccagcgtgggctggaccagtgagaccctgtctcagctcagtgagaccagtaagaccctgtctcaatcaatcaatcaatgcagtgagttagagagcatctattgagcatctacggtttgcgggtcacttccagcaccattttgagatgcggaaactggctgaagttgggtgattgattgaccaagttcctttgggaaattaataaagtcacactgaagcaataaactaccctcacctccaccaccagctttctcaggagaccccttcccattgcctgccccagacctcagggaccatggctgggtgtgtgggtctgtgctttctgcctttgcagtgtgtggtaatcgagagggtgggtcggcgcgtgctgctcatcggtgggtacagcctgatgacctgctgggggagcatcttcactgtggccctgtgcctgcaggtagctggggtggatgagggctggggggtc

SEQ ID NO: 11052 - protein, 135 aa, Homo sapiens
MELCGNDSVYAYASSVFRKAGVPEAKIQYAIIGTGSCELLTAVVSVSLEGALPPPALWGGTPRSSALNQFTLQLMVLKCSEGPGAVAHACKPSTLGGRGGWITRSGVRDQPGQHSETPVSTKKYKKLSRRGGGRL

SEQ ID NO: 11053 - DNA, 1248 bp, Homo sapiens
ggcccctttggctgtccatgtcttgtcatcctcctggctagcctggaatgttctcatgaaggcagaagagcaagtagaagtgagcaaggcctcttaaggcttaggctggaacatggtacgccctcactgcagcctcatcctattggccgagcccagagccaggagcagggatgtaggcagtacttgcccctttagtgggaggaactgcaaaatcacacagcaagcagtgtgggtgcagggaggggtgaagaattgggtttgataatgtgctgcaatagtcatgtcctgtctgatatgtccgcagaaccctgcgtttctttctaaagccttttttcatccatggtggcaacaccgcaacagccctgagaaatgtcagggcaaggaagatcatctccatctgaccagggaggcaaacagagacagagagattgagagagacagaggcagagagagagaaacacacacacacacagacagacacagagacagagagattgagagagacagaggcagagagagagagaaacacacacacacacagacacagagacagagagattgagagagacagaggcagagagagagaaacacacacacacacagacacagagacagagagattgagagagacagaggcagagagagagagaaacacacacacaacacacagagacagagagattgagaaagacaggcagagagagagagaaacacacacacacagacacagagacagagagattgagagagacagaggcagagagagagagaaacacatgcactccagcgtgggctggaccagtgagaccctgtctcagctcagtgagaccagtaagaccctgtctcaatcaatcaatcaatgcagtgagttagagagcatctattgagcatctacggtttgcgggtcacttccagcaccattttgagatgcggaaactggctgaagttgggtgattgattgaccaagttcctttgggaaattaataaagtcacactgaagcaataaactaccctcacctccaccaccagctttctcaggagaccccttcccattgcctgccccagacctcagggaccatggctgggtgtgtgggtctgtgctttctgcctttgcagtgtgtggtaatcgagagggtgggtcggcgcgtgctgctcatcggtgggtacagcctgatgacctgctgggggagcatcttcactgtggccctgtgcctgcaggtagctggggtggatgagggctggggggtc

SEQ ID NO: 11054 - protein, 36 aa, Homo sapiens
MHSSVGWTSETLSQLSETSKTLSQSINQCSELESIY

SEQ ID NO: 11055 - DNA, 2845 bp, Homo sapiens
tccgtgttccggaaggcaggagtgccggaagcgaagatccagtacgcgatcatcgggactgggagctgcgagctgctcacggcggttgttagtgtgagtctggagggtgcccttcctccaccagccctgtggggagggacccccaggtcctctgcattaaaccagtttacactccagcttatggtgttaaaatgcagtgaggggccaggtgcggtggctcatgcctgtaagcccagcactttgggaggccgaggtgggtggatcacaaggtcaggagttcgagaccagcctggccaacacagtgaaacccccgtctctactaaaaaatacaaaaaattatcccggcgtggtggcgggcgcctgtaatcccaggtacttgggaggctgaggcaggagaatcgcatgaacccagtaggtggaggttgcagtgagccgagatggtgccattgcactccagcccaggcaatagtgctgaggtgggatcaggagttggagaccagcctgggcaacatggtgaaaccccgtctctacaaaaaatacaaaaattagccaggcgtggtggtcttcgcctgtagtgctagctactggcgaggctgaggtgggaggatcacttgagcctaggaggttgagactgcagtaaaccgagattgtgccactgcactccagcgtgggctggaccagtgagaccctgtctcagctcagtgagaccagtaagaccctgtctcaatcaatcaatcaatgcagtgagttagagagcatctattgagcatctacggtttgcgggtcacttccagcaccattttgagatgcggaaactggctgaagttgggtgattgattgaccaagttcctttgggaaattaataaagtcacactgaagcaataaactaccctcacctccaccaccagctttctcaggagaccccttcccattgcctgccccagacctcagggaccatggctgggtgtgtgggtctgtgctttctgcctttgcagtgtgtggtaatcgagagggtgggtcggcgcgtgctgctcatcggtgggtacagcctgatgacctgctgggggagcatcttcactgtggccctgtgcctgcaggtagctggggtggatgagggctggggggtccaggccgggctgacttccacctcacccccgccccgtccacggcagagctccttcccctggacactctacctggccatggcctgcatctttgccttcatcctcagctttggcattggccctggtgagtgggcccaaggggctctgggcatccatcatcacatagaaggagtgatgggtgcctgggtgcacagtgggtgggtgtgaatgcaatgtcccctgcaggccctcagagaccacctcatgccggggcttctgggagggaatggcaggaggagagcactgaggggccccccatacagactgggcctgggctcccactcccatgtctgggctggggtcggggagaggcaggcagggaaccctggccagcagccccctgtccctgcccctccttctagccggagtgacggggatcctggccacagagctgtttgaccagatggccaggcctgctgcctgcatggtctgcggggcgctcatgtggatcatgctcatcctggtcggcctgggatttccctttatcatggaggccttgtcccacttcctctatgtccctttccttggtgtctgtgtctgtggggccatctacactggcctgttccttcctgagaccaaaggcaagaccttccaagagatctccaaggaattacacagactcaacttccccaggcgggcccagggccccacgtggaggagcctggaggttatccagtcaacagaactctagtcccaaaggggtggccagagccaaagccagctactgtcctgtcctctgcttcctgccagggccctggtcctcactccctcctgcattcctcatttaaggagtgtttattgagcaccctttgtgtgcagacatggctccaggtgcttagcaatcaatggtgagcgtggtattccaggctaaaggtaattaactgacagaaaatcagtaacaacataattacaggctggttgtggcagctcatgactgtaatcccagcactttgggaggccaaggtgggaggatcaattgaggccagagtttgaaaccagcctaggtaacatagtgagaccccctatctctacaaaaaattttaaacattagctgggcatggtggtatgtgctaacagctctagctactcaggaggctgaggcagcaggatcacttgagtccaagagttcaaggtagcagtaagctacaatcacaccactgcatgccagactgggtgacagagggagacttcatctctttaaaacataataataataattacagactcaggaaatgcagtgaaagaaaaatacaggttggccaggtgaggtggctgatgcctgtaatcccagcactttgggaggccaagatgggaagattgctttgagaccagaagtttgagaccagcctgggccacatagtaagatcctgtttctaccaaaaaaaaaaaaaaaaaaaattagctgggtgtggtggtacatgcctgtggtcccagctactcaggaggctgaaatgggaggatcacttgagcctgggaggtcgaggctgcagtgagtcctaattgagccactgcactccagcctggacaacagaaagagaccatgtttcaaaaaaaataaatacaggttgtagtgggtatgggtatgcataccaggaggcccgacctcgtctgagaggggagtggtcagaaaagaattttctgaggaattgatgtttttaatcaactttattgaggtataattt

SEQ ID NO: 11056 - protein, 134 aa, Homo sapiens [sequence omitted]

SEQ ID NO: 11057 - DNA, 11358 bp, Homo sapiens
atgcagcatgacataggtaaaagaacacagaattttgaaccaatctaccctgagattgaattcttgcccactatctgtgcaacttgggcatacttccgacagggtgttgccctccagtaccttggacgtcatgccgatgccctggcagcctttgcatctggactggctcaagaccccaagagtctccagcttctggtggggatggtggaagccgccatgaaatctcccatgagagactccctcgagcccacttatcagcagcttcagaaaatgaaactggacaagagtccctttgtggtcgtgtctgtggttgggcaggaactcctgacagctggccatcatggggcctctgtggttgtcttagaagccgcactgaagattggcacctgcagcctcaaactgagaggttctgttttctctgccctgagcagtgcttactggtctcttggaaatacagagaagagcaccggatatatgcagcaggacttggatgtagccaagaccttaggtgaccagacaggagaatgccgagctcatgggaatctgggctctgcattcttctccaaaggaaattaccgggaggctctcactaaccacaggcatcagttggtactcgccatgaaactcaaagatcgagaggcagcttcatcagccttgagcagtctgggccacgtgtacacagccattggagactaccccaatgcactggccagtcacaaacagtgtgttcttcttgccaagcaatccaaagatgaactttctgaagcccgagaacttggcaacatgggagctgtgtatattgccatgggtgactttgagaatgctgtgcagtgccatgagcagcatctgaagatagccaaggacctggggaacaagcgagaagaggcccgggcttatagcaacctgggcagtgcctatcactaccggaggaactttgacaaggccatgtcttaccataactatgtcctggagctggcacaggagttgatggagaaggctattgagatgcgggcctatgctggactaggccatgctgccaggtgcatgcaggatttggagagagctaaacaataccatgagcagcagctgggcattgctgaggatctcaaggaccgggctgcagaggggcgagcatcctccaatctaggaatcatacaccagatgaaaggtgattatgacactgcactgaaactccacaagacccacctgtgcattgcccaggagctgagtgattatgctgcccagggccgtgcctatgggaatatgggcaatgcctacaatgccctgggcatgtacgaccaggcggtcaaataccatcggcaggagctgcagatctccatggaagtgaatgaccgcgcctcacaggcctccacacatgggaaccttgccgtggcctaccaggccctgggtgcccatgaccgggccctgcaacactatcagaaccacttgaacatcgcccgggagctacgagacatccagagcgaggcccgggccctcagcaacctgggcaatttccactgctctcggggagagtatgtccaggctgccccctattatgaacagtacctccggcttgctcccgaccttcaagacatggaaggagaagggaaggtctgccacaatcttggctatgcccattactgccttggaaactatcaggaggcagtgaagtactacgaacaggatctggcactggctaaagaccttcacgacaagttgagccaagcaaaagcctactgcaacttgggcctagcattcaaggctctgctgaatttcagtaaagctgaagagtgtcagaagtacctactgtccctagcccagtctctgaataattcccaggctaaatttcgagccctaggaaacctgggcgatatattcatctgtaaaaaagatataaatggtgcaataaaattctatgagcagcaactgggcttagctcaccaggtaaaggacagaagattagaagccagtgcatatgcagccctgggcactgcataccgaatgatccagaagtatgacaaggccctgggttatcacacacaggaactggaggtatatcaggagctgagtgacttgccaggggagtgcagagctcatgggcacctggctgctgtctacatggcccttgggaaatacacaatggcattcaagtgttatgaagagcaactggatctagggcaaaagctgaaggatccgagtctggaagcccaggtctatggcaacatgggcatcacaaagatgaacatgaatgtgatggaagaagccattggctactttgagcagcaattggccatgctgcagcagctaagtggaaatgagtctgtgctcgacaggggccgggcctatggcaacctgggggattgctacgaagccctgggtgactatgaggaagctatcaaatactatgaacaatatttatctgtcgcgcagagtctgaatcgcatgcaagaccaagccaaggcttaccggggcctgggaaatggacacagggcaatggggagcttgcagcaagcccttgtgtgctttgaaaagaggctcgtggttgctcatgaacttggagaggccttcaataaagcccaggcctatggagagctgggaagtctgcacagccaattagggaattacgaacaagccatttcctgccttgaacgccagctgaacattgctagagatatgaaagaccgagccctggagagtgacgcagcctgtggcctggggggcgtttaccagcagatgggggagtatgacacagccctgcagtaccaccagcttgatctacagatagcagaggaaaccaacaaccccacgtgccagggccgagcctatgggaacctgggcctgacttatgaatccctgggcaccttcgagagggctgtggtctatcaagaacagcacttgagcattgctgcacagatgaatgacttggcggccaagacggtgtcatatagtagccttggaaggacccatcatgccttgcagaactattcccaagcagtcatgtacttacaggaaggtttaaggttagctgagcaactgggccgaagagaagatgaggcaaaaattcgccatggccttggcctctccctttgggctagtggaaacttggaggaggcccaacaccagctttatagggcatcagccttgtttgaaacaatccgacatgaggcacagctgagcacggactacaaactctccctctttgacctgcagacatcatcctaccaggccttgcagcgggtgctcgtcagcctaggccatcatgatgaagccctggctgtggcagaaaggggacggacaagggcatttgctgatcttctggtggaacgacaaacaggacaacaagactccgacccctactccccagtcactattgatcagatcttagagatggtaaatggccagaggggactagtgctttactattccctggctgcaggctatctgtatagctggctgctggctcctggggcaggaattgtgaagtttcatgaacactacctgggtgagaacacagtggaaaactcaagtgacttccaggccagcagcagtgtaacccttccaacagcaaccggctcagccctggagcagcacattgccagtgtccgggaggccctgggggtggagtctcactactcaagggcctgtgccagcagtgagacagagagtgaagcgggagacatcatggaccagcaatttgaagagatgaacaacaaactcaactcggtcactgaccccactggctttctgcggatggttcgccgcaataacctgtttaacaggagctgccagagcatgacgagcctgttcagtaacactgtgtcaccgacccaggacgggacctcctctcttcccaggaggcagagctcgtttgccaagcccccgctccgtgccctgtatgacctgctcatcgcgcccatggaagggggcctgatgcactccagcggccccgtgggccggcaccggcagctcatcctggttctggagggggagctctacctcattcctttcgccctcctgaagggaagctcctccaatgagtacctctacgagcgcttcggcctccttgctgtcccttccatccgctccctcagcgtgcagtccaagtctcacttacggaagaacccgcccacatactccagctccacatccatggcggctgtcatcggcaaccccaagctaccatcggccgtgatggacaggtggctgtgggggcccatgccatcggccgaggaagaggcctacatggtgtccgagctgctgggctgccagcccctagtgggcagtgtggccaccaaggagagggtcatgagtgccctgacccaggctgaatgcgtccactttgccacccacatctcctggaagctgtcggccttggtcctcacgcccagcatggacggcaaccctgccagcagcaagagctccttcggccacccctacacgatccctgagtccttgcgggtgcaggacgatgccagtgatggggagagcatctcggactgcccgcccctgcaggagctgctgcttactgccgccgacgtcctggacctgcagctgcctgtgaagctggtggtgcttggctcctcccaggagtccaacagcaaagtcacagccgacggggtcatcgcgctgacaagggccttcctggctgccggcgctcagtgtgtcctcgtgtctctgtggcctgtgccagtggctgcttctaagatgttcatccatgccttctactcatccctgctgaacggcctgaaagccagcgccgccctgggggaggccatgaaggtggtgcagagcagcaaggccttctcgcacccctccaactgggcagggttcatgctcatcgggagtgacgttaagctgaacagcccctcatcactcatcggccaggccctcacagagatcctgcagcacccggagcgtgcgcgggacgccctgcgagtgctgctgcacctggtggagaaatccctgcagcgcatccagaatgggcagcgcaatgccatgtacacatcccagcagagtgtggagaacaaagtgggcggcatccctggctggcaggccctcctcaccgctgtgggcttccggctggaccccccaaccagtggcctgccagcggctgtcttcttcccaacctccgacccgggcgaccggctccagcagtgcagcagcacactccagtccctgctgggtctgcccaatcctgccctccaagccctttgcaaactcatcactgcctccgagacgggcgagcagctcatcagccgggctgttaaaaatatggttggaatgctccaccaggtgctggttcagctccaggctggcgagaaggagcaggacttggcatcagctcccattcaggtctccatcagcgtccagctgtggcggctcccgggatgccacgagttcctggcagctctaggttttgatctctgtgaagttggtcaggaggaagtaatcctgaaaaccgggaagcaagctaatcgacggactgtgcacttcgcgctccagtccctgctgtctctgtttgattctactgagctacccaagcgcctcagccttgacagctcctcctccctcgagtctcttgcttctgctcagtctgtttccaacgccctgcccttgggttaccagcaaccccccttctctcccaccggtgcggacagcatcgcctcagatgccatctctgtgtacagtctgagctccattgcctcctcaatgagctttgtctccaaacccgagggtggatcagagggtggaggccccggaggacggcaggaccatgaccggtccaagaacgcttacctgcagagatccaccctgcctaggagccagctgcctccccagacccgccctgcaggcaacaaagatgaagaagaatatgaagggttttctatcatcagtaacgagcccttggcgacctaccaagaaaaccgaaacacatgcttctcaccagaccacaaacaaccccaacctgggacagccggaggcatgagagtctcggtgagctccaaagggagcatcagcactccaaattctccagtgaaaatgactctgattcccagccccaactcacccttccaaaaggtgggaaaactagcaagctcagatacaggagaatcagaccagtctagcacagaaacggacagtaccgtgaaatcccaagaagaaagcaacccaaaactggatccacaagagttagcccagaaaattctggaggagacacagagtcatctcattgcggtggagcgtcttcagaggagcggcggccaggtgagcaagagtaataaccctgaagacggcgttcaggcgcccagcagcactgctgtcttcagagcgtcagaaaccagtgcgttcagcaggcctgttctctcccatcagaagagtcagccatcaccagtcactgttaaaccaaagcccccagccaggagctcctccctgcccaaggtgagttccggatatagcagccccaccacctcagagatgtccatcaaagacagcccgagccagcacagtggccggccatcgcccggctgcgactcacagacttcccagctggaccagcctctctttaaactgaagtaccccagctctccttacagcgctcacatttccaaatcaccaaggaacatgtccccaagctccggccaccagtctcctgctggcagtgcaccctccccagctctctcctactcctcagctggatctgctcgctcaagtccagcagacgctcccgacatagacaaactgaaaatggcagccattgatgaaaaggtgcaggctgtccataacctgaagatgttctggcagagcacaccccagcattccacagggccaatgaagatcttccggggggctcctggcacgatgacttccaaaagggatgtcctcagtctgttgaatttgtcaccacggcacaataagaaggaggagggagtggataagcttgaactgaaggagctgtccctgcagcagcatgacggagctccaccgaaagcccctcccaacggacactggcgcaccgagaccacctcgctgggctcactgccgctgcccgccggccctcccgccacagcccccgcgcgccctttgaggcttccttctggaaatggctacaagttcctgtctccaggaagatttttcccttcttccaaatgctaaagcatcttttatacccactgactctgagcagcctgcagatgggggcctggcgtttgcttcagcccttccctgagtgcagtccccccacagccaccagcaccctcatgatgctgtgctctgcaggcgaggggcaccaccacgtccaaaggctgccacacacactggtggcttttctgggccacattcaccaaaagccaggacttctgtggggctggtacaggaggctcatggaatttcctacacacttcaccaaatgtttgtttacctttgaactccctgcttctcatctttgatatgattcttcaccaggattttgtacaaaaatgatcatggttctggggtggggagaggaaagggagcacatattttgctaagaggtatatatgcagtaccttttatacacagaaatacaaatagagctttttctaaggctttcggttgctggttgggggtgggatatatgaaatttcagttgaattctacaggaaagtgttatattagccaaaaacagaaaaatggtttttaaaatgccaatgatttgtaattaaattgtagcaattttggtctcatgatagtgtaatatctcagcaacaatgcaataattcacattgaaacagcgcttccattctgaactctgctctgcaaatgtcttttgggtcccgctgtcaaccaaacttgaattttcttaaaaaaaaaattatgtaactcttatccaggcattttagaactatgcaattgtgatttaaaatgcaactttgtgcttttaaaacattattgaccttttttgtatatggataaacaacttggttttattatcaatagtactttgcatttatagctattatttttaaaagctcaaaaagttttttaaaatgtcaaattttgaatagtcatcaataagtaattatcaagtttggaaggaaaggttgaaatgactccgtttccttataagcaaaaaaaaaaaaaaaaaaaaaaaaaaaaaaaaaaaaatttccatggctaactagatttaaccagaatcccgccttccaggctcctgttcccttttattagctgctgaattttattcccttttcccaactccaggtccctcagttgtcttatatctaaatcctttgccaggtccccacaatcccagcacctgcctctgtgagctgcccccaggccctcaccttggccctggccagcctcctgtgctcctgctgtctgaaggactggcccctcccccactgctgaagccacacgtacagatcctaagcaacagggccttttgctgggacgtatgcctggattatggccaaccgggaagagagagatgtatcttaaaaagtggaggtggacttctcctacagctctgacggtaacttaaattgttgccagcttgaggcaagacaagggaatcatctagttaggggtaaccattaatttattttataaagaaaggaaatgctgaaagtcgtattagtactgagtttagttggagaatttagataagtaagtatcttttaggtaattctaaaattaaaatcctacccacctcactacagggttcctcatgaaggtgggcggccacctggcctgggccaccagcagcacatggagcagacctgaggggcctggcagggggcactgacctcaggatccccaggtgggggttttaaccatgggtgggatctcagcttctgcgcatacactgacaatctcacctgttcctcagtgtactcctctgaaaagaagaaaggataatatttatccaatctgtgttctcctgagctccatcctaggggtttttaatttaaccaacagccatgttgacaaaagccaacaataagcatgtcttattctagccctgatcccaacactgaaagcgaagtactttataaagaagccagcaattatgagggtttctttatgttagtaggggaaaaaatggtaataaaagtaccagtgtagcaagtgaagaccaaatttatagcactgtgcattagatagcaaaatcaggttcttaacaatgaaaagtaaacctcaagtttctaaatccatatgcagatggttaggctgtccctctcttagcaaatctctcagcctccttctttcccaagtgccaaggatccctggagtaaagctctggggtctgtgctctctttctgtgaggggaaggctgcggccctatttgcccctctctagcaaacacccccaccaccctgccgcttcctgtggttattgagccagctaggagttactcatggactctaacctggttttagtcccatgtacatcgttgttttaggtttcatactgaagagccaatggtttatgtggttttattctgtcttaaatataagtttcaaggaagggaaaacaaaagtgataaaatgatagaacagtctagaggccactgtaaagtcaccgccactttacgtgtatgtcagtcttggtgttcttgtatgagtaaaatggatgtaaaatcataaaatcacagtgaatgtttcaggctacactggaaaaagtatgcacttagaattaaaggaaattgtataattcaccaagatttctttgtgtagatcaggggttggcaactatgacccacaggctaagactggtcagcggtctggtttttcacagccatgagctaagttacctttttaaagggttatataagtaattacatcatatttttgattttgcctttggcccacaccacataaaatattcaatacctggcctttttttttttttttgagacagagtctcgctctgtcacccaggatagagtgcactggtgcgattttggctcactgcaacctcttcctcctgggttcaagcaattctccctgcctcagcctctaagtagctgggactacaggcacccactaccatgccttgctaatttttgtatttttaatagagatggggtttcaccatgttggccaggctggtctcgaactcctgacctcaggggatccgcccgccttggcctcccaaactgctgggattacaggtgagccactgcgcccagccaatacctggccttttaagaagtttgctgactcctggtatggatgacagaaaatggaataacgttttgtttctccagtctaggaaaagcaagtcaggtagtggatagactgactggcgtccggggagcccagggtatgtgagggccacgtggatggaagcaaatgcctcctgcatagcccttggctctttgtcccacttgggaggagtccatggatgtaatatttacaaaacaattttttccttaccatttgcagaaagcattgcatatatttccttttagctcaggaaactggcatgccccaccctctgctactccatcagatgtaaatacaatgactataagccgtacaactcccctctcttagaaacctcagcaggaccacagagcaagggagtcaaagctttcttaattctctccagtaaatgactcaactaatttgatttttttaattaagtcaaaatatcaagagaaaaattgctactaaaacttacattttgatccacactgatgtgcaacacaaaatgaaagttttcacctccattccattttttaaaaattcacggtccacactgaaacttgctgggttttagcaggagacaaaggtgtcacccacgctgtcctcatcctgctctctctgtcccagtgacgctccagcatatgatcactgcagccggtccctggcccgtgccgattctgccacctcccagccacacacatttgcagacccacaagaagaactgtagccttgataatttcagttcaggctggaaaaatgccatgcaataatctggtttgctttcagtaagtaggcaacaagtgaaaactgtataattttcatcacctattctgctgttctatctaaaatgagtgtacctgtggtttgtgaactgggcccttgtttgtgccagatccttcaaagatgttccctgtcaggacacctgtggccctgcccctcctcagacaccttcccactggcattcacgttccttatatgcagtgttagccatctttggcctacgtggactttttttgtaaattacaccatttccagacattaaactttttatattatgaaatttaccatgtaaaaagaacttcatatttttattgagattgctaaggcacttggccttcctcctttgtgattttcagtgtctattaaagcatgagttccctcagtttta

SEQ ID NO: 11058 - protein, 2383 aa, Homo sapiens
MQHDIGKRTQNFEPIYPEIEFLPTICATWAYFRQGVALQYLGRHADALAAFASGLAQDPKSLQLLVGMVEAAMKSPMRDSLEPTYQQLQKMKLDKSPFVVVSVVGQELLTAGHHGASVVVLEAALKIGTCSLKLRGSVFSALSSAYWSLGNTEKSTGYMQQDLDVAKTLGDQTGECRAHGNLGSAFFSKGNYREALTNHRHQLVLAMKLKDREAASSALSSLGHVYTAIGDYPNALASHKQCVLLAKQSKDELSEARELGNMGAVYIAMGDFENAVQCHEQHLKIAKDLGNKREEARAYSNLGSAYHYRRNFDKAMSYHNYVLELAQELMEKAIEMRAYAGLGHAARCMQDLERAKQYHEQQLGIAEDLKDRAAEGRASSNLGIIHQMKGDYDTALKLHKTHLCIAQELSDYAAQGRAYGNMGNAYNALGMYDQAVKYHRQELQISMEVNDRASQASTHGNLAVAYQALGAHDRALQHYQNHLNIARELRDIQSEARALSNLGNFHCSRGEYVQAAPYYEQYLRLAPDLQDMEGEGKVCHNLGYAHYCLGNYQEAVKYYEQDLALAKDLHDKLSQAKAYCNLGLAFKALLNFSKAEECQKYLLSLAQSLNNSQAKFRALGNLGDIFICKKDINGAIKFYEQQLGLAHQVKDRRLEASAYAALGTAYRMIQKYDKALGYHTQELEVYQELSDLPGECRAHGHLAAVYMALGKYTMAFKCYEEQLDLGQKLKDPSLEAQVYGNMGITKMNMNVMEEAIGYFEQQLAMLQQLSGNESVLDRGRAYGNLGDCYEALGDYEEAIKYYEQYLSVAQSLNRMQDQAKAYRGLGNGHRAMGSLQQALVCFEKRLVVAHELGEAFNKAQAYGELGSLHSQLGNYEQAISCLERQLNIARDMKDRALESDAACGLGGVYQQMGEYDTALQYHQLDLQIAEETNNPTCQGRAYGNLGLTYESLGTFERAVVYQEQHLSIAAQMNDLAAKTVSYSSLGRTHHALQNYSQAVMYLQEGLRLAEQLGRREDEAKIRHGLGLSLWASGNLEEAQHQLYRASALFETIRHEAQLSTDYKLSLFDLQTSSYQALQRVLVSLGHHDEALAVAERGRTRAFADLLVERQTGQQDSDPYSPVTIDQILEMVNGQRGLVLYYSLAAGYLYSWLLAPGAGIVKFHEHYLGENTVENSSDFQASSSVTLPTATGSALEQHIASVREALGVESHYSRACASSETESEAGDIMDQQFEEMNNKLNSVTDPTGFLRMVRRNNLFNRSCQSMTSLFSNTVSPTQDGTSSLPRRQSSFAKPPLRALYDLLIAPMEGGLMHSSGPVGRHRQLILVLEGELYLIPFALLKGSSSNEYLYERFGLLAVPSIRSLSVQSKSHLRKNPPTYSSSTSMAAVIGNPKLPSAVMDRWLWGPMPSAEEEAYMVSELLGCQPLVGSVATKERVMSALTQAECVHFATHISWKLSALVLTPSMDGNPASSKSSFGHPYTIPESLRVQDDASDGESISDCPPLQELLLTAADVLDLQLPVKLVVLGSSQESNSKVTADGVIALTRAFLAAGAQCVLVSLWPVPVAASKMFIHAFYSSLLNGLKASAALGEAMKVVQSSKAFSHPSNWAGFMLIGSDVKLNSPSSLIGQALTEILQHPERARDALRVLLHLVEKSLQRIQNGQRNAMYTSQQSVENKVGGIPGWQALLTAVGFRLDPPTSGLPAAVFFPTSDPGDRLQQCSSTLQSLLGLPNPALQALCKLITASETGEQLISRAVKNMVGMLHQVLVQLQAGEKEQDLASAPIQVSISVQLWRLPGCHEFLAALGFDLCEVGQEEVILKTGKQANRRTVHFALQSLLSLFDSTELPKRLSLDSSSSLESLASAQSVSNALPLGYQQPPFSPTGADSIASDAISVYSLSSIASSMSFVSKPEGGSEGGGPGGRQDHDRSKNAYLQRSTLPRSQLPPQTRPAGNKDEEEYEGFSIISNEPLATYQENRNTCFSPDHKQPQPGTAGGMRVSVSSKGSISTPNSPVKMTLIPSPNSPFQKVGKLASSDTGESDQSSTETDSTVKSQEESNPKLDPQELAQKILEETQSHLIAVERLQRSGGQVSKSNNPEDGVQAPSSTAVFRASETSAFSRPVLSHQKSQPSPVTVKPKPPARSSSLPKVSSGYSSPTTSEMSIKDSPSQHSGRPSPGCDSQTSQLDQPLFKLKYPSSPYSAHISKSPRNMSPSSGHQSPAGSAPSPALSYSSAGSARSSPADAPDIDKLKMAAIDEKVQAVHNLKMFWQSTPQHSTGPMKIFRGAPGTMTSKRDVLSLLNLSPRHNKKEEGVDKLELKELSLQQHDGAPPKAPPNGHWRTETTSLGSLPLPAGPPATAPARPLRLPSGNGYKFLSPGRFFPSSKC

SEQ ID NO: 11059 - DNA, 5870 bp, Homo sapiens
atcacaaaggcggtgagactgcattcacttacaggttcctatttagggccaagttgctctgcctttccaaatcagcatgggcctcaggccctggctcagccctccaggctcgacttacccggctgatgagctgctcgcccgtctcggaggcagtgatgagtttgcaaagggcttggagggcaggattgggcagacctaaaccaagaaaaaagggtagaagttattcagaagggcctctgcacccaaaagcctgccaccttcccaggggaaagaaccctaaatccttggcatcggtggcatttttcagaagctcagcacagctagacatgtgtgtctgtgtgtgccttggaaaaggacagcgtggtctcccaggaaggtgggtggaagtgggttgagtcctgaccctgccgcagtcctctaggcgtggccacactcccaggacccaggcagcaccacccctagtcaagcacccagcttcaccctggggttggccgcacagcttcatcggggccacagctgctgatgacaatggcagtagtggccagtgtctgccggcacgacctcccatcatcccgggaaggggcagcgccagtggggcgcagatgcctgccatcacagatggaaacagcaggtaaatggcacttgtttcctccaggtgtggagatgcttgtatctgggaccccctgccatttctcaggacaccctcctgctcctagctgggagatccagcatcctcatgaatgcggggcccaaggccaccaactgttccacctgctgtcagccaggcctgttgccccagccctacacccacagctcacccagcagggactggagtgtgctgctgcactgctggagccggtcgcccgggtcggaggttgggaagaagacagccgctggcaggccactggttggggggtccagccggaagcccacagcggtgaggagggcctgccagccagggatgccgcccactttgttctccacactctgctgggatgtgtacatggcattgcgctgcccattctggatgcgctgcagggatttctccacctgagggggaattggggtaaacactgggatgccggagctcaggcatcccagacaggaggaagtgtgtactcacaccagccaggaggaaacaagcctgcctgggaggacagacgatcagccctggctgtccctcaggagcggggggcctccaaggcacactgcccactgggtcaaggagtatccaggaggagttagaagcatgacccatctgcctggcaccagcacctggggctgccaggcagccacccctgcagctgtgttgacaggacctggcagagggactgacccacctttggaaaatgacaccagcaatatcaggatgtgtcaactggatttatgctaagaaaataggatttttggtgttcctctgtttcccaaagtttgagacactttcagacactctgctttgcggttgtggccgatgttacccatgggtgggacttttgctttgctctagatttttgtaacaccctggggagtttcaggggccaatgctgagagaagaccacaggctgacacatcatgaggtgcctaacttactgagaatcatgcctgctgtgatgagcccttggaaaccatcaggactggatggtaggggtcctgagaggattgggggaggaggccttgatatgacagagtggacagaggccgtggaacccaggacagccagcctgctccacaatcctcatccccacagaccttcatgtgtggctcctaaataagaggaaacccactcctgataagtcaggggctttgaaaagtgattttgtttaaatggtgcaaacaagcaagccaatcttggggagacagggctaaacttaagtcctttaagaagctctacatactgacaagattctagttcccttccaccttatatgctgcaaagtaaaaagtatcactgaatgagaaaatcagcataaagaagcccaataatgtctgcctgagtttcccctatgatgacttttggtactttttgggaaacattaagtatgaagttatttcaaaataattttttggtgcctctgcttggtgatgccttaaactctgggtaagagaaacaccaggtgcctgtcaggagatggccttttccaggtttctggttaagctacaaacagctaactggctgctgtcatcaaaataaaagctttctgaaggtggaggcatctgatacccagagtgctgctatcagccggcacggtgggccgctgggtggcaggagcgtcgagaaggccagctcgcttcctatctgggattcagaatcagctatggaaacttgagagacctagagaaaataacttctttcactttgaactgattctttgcttcataagaaaagtattatccagccacaaaaatggtcaaaattcagatctacaaaagcctgtcaggcagaaactgaccccacttaggccacgccaatgagcaagtcatcaaagcagccaagacaggtcctgtgggggccacccatgcacagggcccagcctcgggtcctaaccccgcctatgctttccgccaccataaagaggcccatctgggtaagacctgtcccgcctgctgtggggtattagggcagatggggtctgaggggtctgagggctctgagagcagctggcagctcaaggacatccggagttggaggatggagcaatgcaggcccttgtggtaaagacagtcctgcagccgcgcaggcagggatgctgcaagtggagtgccaggcgggtgcggagccctgtgggactgtggaggggtcagagggaagccaggattttggggtctctgagagtttggagaaggggaagaagattaaagcttgtttcaaaagtttctaatcaggtgggcagggccaagggtggctgtggggtgagacccatgactcagggtggcccactgttactctattgatttttgggcgtttttttccaaattgattattcttgctgaatgagacctgagtccttgactgtccccttaaagccacctgacttgttttcagttccactggcctgtcgggctgttttctactcaactccactcttgcttgtctgccctccctgcctggggcccagccagcagtcagctcaagggccagatgaattgggtggctgtgctctgcccactgggcatcgtgtggatggtgggtgaccagccccctcaggtgctcagccaggcctcaagccttgctgtgtacctcagagcagctccgtaccctgatgtcacagcaaagaaacttagacatgacacaaactgtggcttcccaaggcagcaaagaatggccaggggtcatgagggccgtgccccacttttggacagacctactctaaagtcacgctacctgcgtgcaaatcataaaatcaacacttttgaggagatcacagctatgccttcgtaacacagcccagtccgaccagatagacggtgcctcgtgacccgaaaacaagcccccggccccccaccatgtgtgtgagccttaccttggactgcacgctgagggagcggatggaagggacagcaaggaggccgaagcgctcgtagaggtactcattggaggagcttcccttcaggagggcgaaaggaatgaggtagagctccccctccagaaccaggatgagctgccggtgccggcccacggggccgctggagtgcatcaggccctatggagcaagcacggagaggctgacatgggtggcccagcaggcaggggtttcaggcaccaggacaaccctgagccctagcctggatgacacaagcacgagcagagacaaatggcttctctggaacatccagctccgaattttaacccagagactatgagagacagaggtcgtcacatccccctcacctcatcttcacgtcaccatcgctatcctccacacctacttactgagccaccaccaagcagttaccctgaagtccagtttccaagcccagagttctcccaggcaacccccaatggatcccgaatgtgtctttgggtggtgaattctgattggattgccgtttcggtcagcgggaccttctgcatatgccctggttgagtacaggtcgagctcttcagaaagcactcatagcaaatgttatgttgatcatgtcctaatctggagtttaagaaagatgcgctccttgcgtatcgccaaggttagaggatctgcaggtgacctccgcggggcaccggggagtttcctttttactggcagacacggcaggcctctcagggattcacagtatcacaggccagaggaatgaaaatctctgatcaccatgggggagggaaagaaaatgcctgggtccatgagctttcagactgattagacttgggatgaaatggactttactgtctacaataaggattccagaggcaaagggcttcagggtatccagataccccagaactgtgtatagggcttcacattttttcctgactgatatttttgatggaataaatttatcaaacagaactgtttaaggtagaggaaccctttctgtgatgctgctgggaaatcctgtcatgatgggtggatacatacagttttggcaaagatcacacacctcctggaaatcaccctcaaccataactgaagcccaccaagactgtagatactgtatttcagccagaaatggaaaagcgaacattcaacccattcaactgtatgctttggccaaacaaccgcccactggtttgcctgaagtacctaagaaggtattggagaaacgtgaccaatggccagcaagagccagaagggcctgcctgaaacccagggtccaacttcagccaaatcagcttgaagggactgttcaagctgcaggagcctctgtgcagtgggcagggttggaggggcggaggggagcctctctctctatcttggctgacctggtaaaaatgatccctccacccctagtggcagaagaccctgacctgcctggaacctgccagggtaaggctaagatgtctgcttgttgaacaccagctagaatagagccagcacgcagatgacactcatgtaacagcagccatccaggtgagaatgccacttaccacgtgagatcttgctggttatcctgggtgctgccaccactggttttagtcatacagacagtttgcaagtaattgcctccatttttcctcctcctaatcagttgtgaaaatgcttgttgtccttgggtgatgtctgtcctcatttgaatatcactacagatgtctcaatcagaaatcaattagacagcctggtggtggggctgccagtctcacaggcctcatcctctacctcatactggaatctaggtctgattgtttctaaggacaaaaattccctggctatacccaagcctcccaatctatttagaaaacaggcagccacgtggtcagtctcattcctgttgcatctgttctaggagaggccgacttatcctgctacctgattttgcaaggggtattttacaaaacacaagggagtcctttcccccagggcagtgattacagtcatgacccaaccaaggccaagccactctcatggccgagccctcggcagagctagacccctgctttcactcttagatgagaagtcttaggtgaaatccctgagctccagtgcttggaaagcagttcaacagcctaacagacataaacaagttttgaataagtttctaggattttaaacaggtgactccacacttcatgaatcacaagctgaggtgaatgagatgtacttttctttctgatcaaagtcatttgctcttgctacctgtcctagaaccttggtttttaaatttaaatacaggaaacagggaatttaaataaagggaaataaaagtaaggataacag

SEQ ID NO: 11060 - protein, 240 aa, Homo sapiens
MTMAVVASVCRHDLPSSREGAAPVGRRCLPSQMETAGKWHLFPPGVEMLVSGTPCHFSGHPPAPSWEIQHPHECGAQGHQLFHLLSARPVAPALHPQLTQQGLECAAALLEPVARVGGWEEDSRWQATGWGVQPEAHSGEEGLPARDAAHFVLHTLLGCVHGIALPILDALQGFLHLRGNWGKHWDAGAQASQTGGSVYSHQPGGNKPAWEDRRSALAVPQERGASKAHCPLGQGVSRRS

SEQ ID NO: 11061 - DNA, 4954 bp, Homo sapiens
agtctgctcctgccccgccgccgcgccggagcccgggcgcccgaagctgggggcgcggccgcgctcgtctcgccgggctgttcgcgggcaggccctgccctgaagggacgaatcggcttggagcgcgggaggtggagtcggccccggcggtcgctccctggacccaacccgaggctgacccaggcccctgcccatgcggggcgcccctggctcggaagagtcccccgggccgggagcagctccaggcagcggccccggaggaagaggaagaagggacagtgctcagcttgggggacccggaccctcgccgcggcatttggagccgggggcagtcccgaactctgtgcttggcaccgccgctccgagtagggcagcgcctgccgggaccctgacccggaccccctgcgcctcgtaggcggcggcgccgccgcgccaccctgttcttccgtgtctccctctgcctggcggcagtcacggccaagaacctacattaagaaacgcattcagatgcatcagccgtttgtaaagcacctgtcgtgagccagagagtattatgagggaggccgaggacttcatgctccggacagagaaacggcgctgggattagggattgccacttctgagaggatgctgggaatctgcagggggagacggaaattcttggctgcctcgttgagtcttctctgcatcccagccatcacctggatttacctgttttctgggagcttcgaagatggaaagcccgtgtctctgtcaccgctggagtcccaggcacacagccccaggtacacggcctccagccagcgggagcgcgagagcctggaggtgcgcatgcgcgaggtggaggaggagaaccgcgccctccgcaggcagctcagcctggcccagggccgagccccatcccatcgccgaggcaaccactccaagacctactccatggaggagggcactggagacagcgagaaccttcgggctggcatcgtggcaggcaacagctccgagtgtgggcagcagccggtcgtggagaaatgcgagacaatccacgttgctattgtctgcgccggatacaatgccagccgggatgtcgtcaccctggtcaaatccgtcctgttccatagacggaaccctctgcacttccaccttattgctgactccattgcggagcagatcctggccacgctcttccagacctggatggtgcccgctgtgcgtgtggacttctacaatgcagacgagctcaagtctgaagtttcctggatccccaataaacattactctgggatttatggtctgatgaagcttgtcctgaccaagactcttcctgccaacctggagagagtcatcgtccttgacacggatatcacctttgccactgacattgcagagctgtgggctgtgttccacaagttcaaaggtcagcaagtcctgggcttggtggagaaccagagtgactggtaccttggaaacctgtggaaaaatcaccgcccatggccagcccttggaagaggctacaacacaggggtgatcctgttacttctggataagctgcggaagatgaaatgggagcagatgtggaggctgaccgcagagagggagctcatgggcatgctctctacatccttagctgaccaggatattttcaatgccgtcatcaaacaaaaccccttccttgtgtaccagctcccctgcttctggaatgtgcagctgtcagaccacacccgctccgagcagtgctacagagacgtgtctgatctaaaggtcattcactggaactcccccaagaagctccgggtgaagaacaagcatgtggagttttttcgcaacctctacctgaccttcctggagtatgacggcaatcttctgaggcgggaactgtttggctgccccagtgaggctgatgtcaacagtgaaaacctccagaagcagctgtctgagctggacgaggacgacctgtgctatgagttccggcgagagcgcttcactgtccaccgcacccacctgtacttcctgcactacgagtatgagcctgcagcagacagcacggacgtcaccctggtcgctcagctgtccatggacaggctccagatgctggaggccatctgcaagcactgggaggggcccatcagcctggccctctacctgtcagacgccgaggcccagcagttcctccgctacgcacagggctctgaggtgcttatgagccgccacaacgtgggctaccacatcgtgtacaaggagggccagttctaccccgtgaacctgctgcgcaacgtggccatgaagcacatcagcactccctacatgttcctgtctgacattgacttcctgcccatgtatgggctctatgagtacctcaggaagtctgtcatccagctcgatcttgccaacaccaagaaagcaatgattgtccccgcgttcgagacactgcgctaccggctgtccttccccaagtcaaaagcggagttgctgtcaatgctggacatggggaccctcttcacattcaggtaccacgtctggacgaaaggccacgcacccacaaacttcgccaagtggcggaccgccaccacgccttaccgggttgagtgggaggccgattttgagccgtatgttgttgtgagacgtgactgcccggagtacgaccggaggtttgtaggctttggctggaacaaagtggctcatatcatggagctggatgtgcaggagtatgagttcattgtgctgcccaacgcctacatgatccacatgcctcatgcccccagcttcgacattaccaagttccgttccaacaagcaataccgcatctgtctcaaaaccctcaaggaagagtttcagcaggacatgtcccgccgctacggctttgctgccctgaaatatctcacagccgagaacaacagctagcaccaagaagcccaccactagggggagacatgctgtaggggaagtgccactcgctgtttggggcccggccttcaaattcaaaattgagccatgctttttcggtttgtttttatttatctctttggcccagccaagctgccctcactacagagaccttggacaaggatccagccagtccctctctgccccacaaccctgcattcccagaggttagctatgcagcccacctagatgagtctcttcaagaatgggaaatcaaggggtgacagggagtaaaagggttatcatcttactgcaaagccacaagatcagggcagggctttaggatgttctggatgctttttaataattatgcttcccatcataactggggagaaagggaagtcagggttctaggggttattcgtcccaggaaatagaagtgaaattgtctttattaagtgaaaactttcccctttgccctgcaatgtagctgggcattcaaacggagggcaaaccgatgatctaaaccaaccacttggaaaaacccaatggggacattgtaaccagagggtcctggaggtggggttgatgggtttccttatccccaaagtcactcctgttttgttttgtttttctttgggggttttgtttatttttggggctggcaatccaaaatagaaaatctgatcctttgaggctctaaaggaaaatcagctgcctctaccaaccaccctctatcagcagtggcccaggaaggaggtcaagcatcttcggccgatatttaaacatgggcagcttccttcaggatgatcaccgaggctcccgtgactttgaactccctactctccagaatccaggggctatagcgatggggactgcggaattacgagggctggctgttttacaccggtcacattttctattggcagtgactgattcatgggaaagggctttgaaggaactacttcagtgcacacacaaggtacgaacctctcaggcctttcgaagaactttcataattcatgaaagcccagttctgaagattcacgtatccatctggagacctacaggaagaaagtgattgggttcctctggttcttgcctgcttcactgtggatgggaagaggtgacaacctcagtctccctttgggacctgtccaagggtaggcaaccaccttcaccttcacacagattgaggagacactggactttttacccattttctttaatcttcaatattaatattgtgtttacattgatgagaacaagagttaatgccctaccctctgctgggctgtttgtattgagttgcaatgtgaccagcgaaagctgcatttaataaatgaaagtacagactgtttcttccccattcccctcccactcttgcaggaagctactgagacacaccttgacatagagagctaaattgcagtggataaacagcaacttcacactttctgttcccccattctatttttctcatcatttgaactttagccttttttttccccttttgcctgaagttagatcccactctgtctctaactcaaaccatcttcaagttttccattccgcatctttctcaacactggagccagatgttgtcttctaccagatgtgggctaggagggtaaatcctggtaatcaattgtaaagggaacatcccatccttgggcctggtagtcatgtgggaccctatagcaatccggtttgtgagatcactcacgatgttacatgctcaagtggatgttacacggaaatttatacaagaattaggaaaattaccattaggactaatttttgcatagatctagctaggcttatgtatgtatgtaaatatatatgtagacagagcatacaagtatatagcctatatacaaagcatttataaataaaaagtgacatatatgtataaagcagaacaaaaattttgaaagtacatgtcaaagtccaatttgttcagtggtgtgccaggccagcttctacatgctcacaaggcctttttgggcatatttccagtttccacgttcagtgattcctctgtccccatccccaagagctagttgttaaatat

SEQ ID NO: 11062 - protein, 756 aa, Homo sapiens; identical to SEQ ID NO: 1718

SEQ ID NO: 11063 - DNA, 4307 bp, Homo sapiens
agtctgctcctgccccgccgccgcgccggagcccgggcgcccgaagctgggggcgcggccgcgctcgtctcgccgggctgttcgcgggcaggccctgccctgaagggacgaatcggcttggagcgcgggaggtggagtcggccccggcggtcgctccctggacccaacccgaggctgacccaggcccctgcccatgcggggcgcccctggctcggaagagtcccccgggccgggagcagctccaggcagcggccccggaggaagaggaagaagggacagtgctcagcttgggggacccggaccctcgccgcggcatttggagccgggggcagtcccgaactctgtgcttggcaccgccgctccgagtagggcagcgcctgccgggaccctgacccggaccccctgcgcctcgtaggcggcggcgccgccgcgccaccctgttcttccgtgtctccctctgcctggcggcagtcacggccaagagagtattatgagggaggccgaggacttcatgctccggacagagaaacggcgctgggattagggattgccacttctgagaggatgctgggaatctgcagggggagacggaaattcttggctgcctcgttgagtcttctctgcatcccagccatcacctggatttacctgttttctgggagcttcgaagatggaaagcccgtgtctctgtcaccgctggagtcccaggcacacagccccaggtacacggcctccagccagcgggagcgcgagagcctggaggtgcgcatgcgcgaggtggaggaggagaaccgcgccctccgcaggcagctcagcctggcccagggccgagccccatcccatcgccgaggcaaccactccaagacctactccatggaggagggcactggagacagcgagaaccttcgggctggcatcgtggcaggcaacagctccgagtgtgggcagcagccggtcgtggagaaatgcgagacaatccacgttgctattgtctgcgccggatacaatgccagccgggatgtcgtcaccctggtcaaatccgtcctgttccatagacggaaccctctgcacttccaccttattgctgactccattgcggagcagatcctggccacgctcttccagacctggatggtgcccgctgtgcgtgtggacttctacaatgcagacgagctcaagtctgaagtttcctggatccccaataaacattactctgggatttatggtctgatgaagcttgtcctgaccaagactcttcctgccaacctggagagagtcatcgtccttgacacggatatcacctttgccactgacattgcagagctgtgggctgtgttccacaagttcaaaggtcagcaagtcctgggcttggtggagaaccagagtgactggtaccttggaaacctgtggaaaaatcaccgcccatggccagcccttggaagaggctacaacacaggggtgatcctgttacttctggataagctgcggaagatgaaatgggagcagatgtggaggctgaccgcagagagggagctcatgggcatgctctctacatccttagctgaccaggatattttcaatgccgtcatcaaacaaaaccccttccttgtgtaccagctcccctgcttctggaatgtgcagctgtcagaccacacccgctccgagcagtgctacagagacgtgtctgatctaaaggtcattcactggaactcccccaagaagctccgggtgaagaacaagcatgtggagttttttcgcaacctctacctgaccttcctggagtatgacggcaatcttctgaggcgggaactgtttggctgccccagtgaggctgatgtcaacagtgaaaacctccagaagcagctgtctgagctggacgaggacgacctgtgctatgagttccggcgagagcgcttcactgtccaccgcacccacctgtacttcctgcactacgagtatgagcctgcagcagacagcacggacgtcaccctggtcgctcagctgtccatggacaggctccagatgctggaggccatctgcaagcactgggaggggcccatcagcctggccctctacctgtcagacgccgaggcccagcagttcctccgctacgcacagggctctgaggtgcttatgagccgccacaacgtgggctaccacatcgtgtacaaggagggccagttctaccccgtgaacctgctgcgcaacgtggccatgaagcacatcagcactccctacatgttcctgtctgacattgacttcctgcccatgtatgggctctatgagtacctcaggaagtctgtcatccagctcgatcttgccaacaccaagaaagcaatgattgtccccgcgttcgagacactgcgctaccggctgtccttccccaagtcaaaagcggagttgctgtcaatgctggacatggggaccctcttcacattcaggtaccacgtctggacgaaaggccacgcacccacaaacttcgccaagtggcggaccgccaccacgccttaccgggttgagtgggaggccgattttgagccgtatgttgttgtgagacgtgactgcccggagtacgaccggaggtttgtaggctttggctggaacaaagtggctcatatcatggagctggatgtgcaggagtatgagttcattgtgctgcccaacgcctacatgatccacatgcctcatgcccccagcttcgacattaccaagttccgttccaacaagcaataccgcatctgtctcaaaaccctcaaggaagagtttcagcaggacatgtcccgccgctacggctttgctgccctgaaatatctcacagccgagaacaacagctagcaccaagaagcccaccactagggggagacatgctgtaggggaagtgccactcgctgtttggggcccggccttcaaattcaaaattgagccatgctttttcggtttgtttttatttatctctttggcccagccaagctgccctcactacagagaccttggacaaggatccagccagtccctctctgccccacaaccctgcattcccagaggttagctatgcagcccacctagatgagtctcttcaagaatgggaaatcaaggggtgacagggagtaaaagggttatcatcttactgcaaagccacaagatcagggcagggctttaggatgttctggatgctttttaataattatgcttcccatcataactggggagaaagggaagtcagggttctaggggttattcgtcccaggaaatagaagtgaaattgtctttattaagtgaaaactttcccctttgccctgcaatgtagctgggcattcaaacggagggcaaaccgatgatctaaaccaaccacttggaaaaacccaatggggacattgtaaccagagggtcctggaggtggggttgatgggtttccttatccccaaagtcactcctgttttgttttgtttttctttgggggttttgtttatttttggggctggcaatccaaaatagaaaatctgatcctttgaggctctaaaggaaaatcagctgcctctaccaaccaccctctatcagcagtggcccaggaaggaggtcaagcatcttcggccgatatttaaacatgggcagcttccttcaggatgatcaccgaggctcccgtgactttgaactccctactctccagaatccaggggctatagcgatggggactgcggaattacgagggctggctgttttacaccggtcacattttctattggcagtgactgattcatgggaaagggctttgaaggaactacttcagtgcacacacaaggtacgaacctctcaggcctttcgaagaactttcataattcatgaaagcccagttctgaagattcacgtatccatctggagacctacaggaagaaagtgattgggttcctctggttcttgcctgcttcactgtggatgggaagaggtgacaacctcagtctccctttgggacctgtccaagggtaggcaaccaccttcaccttcacacagattgaggagacactggactttttacccattttctttaatcttcaatattaatattgtgtttacattgatgagaacaagagttaatgccctaccctctgctgggctgtttgtattgagttgcaatgtgaccagcgaaagctgcatttaataaatgaaagtacagactgtttcttccccattcccctcccactcttgcaggaagctactgagacacaccttgacatagagagctaaattgcagtggataaacagcaacttcacactttctgttcccccattctatttttctcatcatttga

SEQ ID NO: 11064 - protein, 756 aa, Homo sapiens; identical to SEQ ID NO: 1718

SEQ ID NO: 11065 - DNA, 4151 bp, Homo sapiens
agtctgctcctgccccgccgccgcgccggagcccgggcgcccgaagctgggggcgcggccgcgctcgtctcgccgggctgttcgcgggcaggccctgccctgaagggacgaatcggcttggagcgcgggaggtggagtcggccccggcggtcgctccctggacccaacccgaggctgacccaggcccctgcccatgcggggcgcccctggctcggaagagtcccccgggccgggagcagctccaggcagcggccccggaggaagaggaagaagggacagtgctcagcttgggggacccggaccctcgccgcggcatttggagccgggggcagtcccgaactctgtgcttggcaccgccgctccgagtagggcagcgcctgccgggaccctgacccggaccccctgcgcctcgtaggcggcggcgccgccgcgccaccctgttcttccgtgtctccctctgcctggcggcagtcacggccaagagagtattatgagggaggccgaggacttcatgctccggacagagaaacggcgctgggattagggattgccacttctgagaggatgctgggaatctgcagggggagacggaaattcttggctgcctcgttgagtcttctctgcatcccagccatcacctggatttacctgttttctgggagcttcgaagatggaaagcccgtgtctctgtcaccgctggagtcccaggcacacagccccaggtacacggcctccagccagcgggagcgcgagagcctggaggtgcgcatgcgcgaggtggaggaggagaaccgcgccctccgcaggcagctcagcctggcccagggccgagccccatcccatcgccgaggcaaccactccaagacctactccatggaggagggcactggagacagcgagaaccttcgggctggcatcgtggcaggcaacagctccgagtgtgggcagcagccggtcgtggagaaatgcgagacaatccacgttgctattgtctgcgccggatacaatgccagccgggatgtcgtcaccctggtcaaatccgtcctgttccatagacggaaccctctgcacttccaccttattgctgactccattgcggagcagatcctggccacgctcttccagacctggatggtgcccgctgtgcgtgtggacttctacaatgcagacgagctcaagtctgaagtttcctggatccccaataaacattactctgggatttatggtctgatgaagcttgtcctgaccaagactcttcctgccaacctggagagagtcatcgtccttgacacggatatcacctttgccactgacattgcagagctgtgggctgtgttccacaagttcaaaggtcagcaagtcctgggcttggtggagaaccagagtgactggtaccttggaaacctgtggaaaaatcaccgcccatggccagcccttggaagaggctacaacacaggggtgatcctgttacttctggataagctgcggaagatgaaatgggagcagatgtggaggctgaccgcagagagggagctcatgggcatgctctctacatccttagctgaccaggatattttcaatgccgtcatcaaacaaaaccccttccttgtgtaccagctcccctgcttctggaatgtgcagctgtcagaccacacccgctccgagcagtgctacagagacgtgtctgatctaaagctccagaagcagctgtctgagctggacgaggacgacctgtgctatgagttccggcgagagcgcttcactgtccaccgcacccacctgtacttcctgcactacgagtatgagcctgcagcagacagcacggacgtcaccctggtcgctcagctgtccatggacaggctccagatgctggaggccatctgcaagcactgggaggggcccatcagcctggccctctacctgtcagacgccgaggcccagcagttcctccgctacgcacagggctctgaggtgcttatgagccgccacaacgtgggctaccacatcgtgtacaaggagggccagttctaccccgtgaacctgctgcgcaacgtggccatgaagcacatcagcactccctacatgttcctgtctgacattgacttcctgcccatgtatgggctctatgagtacctcaggaagtctgtcatccagctcgatcttgccaacaccaagaaagcaatgattgtccccgcgttcgagacactgcgctaccggctgtccttccccaagtcaaaagcggagttgctgtcaatgctggacatggggaccctcttcacattcaggtaccacgtctggacgaaaggccacgcacccacaaacttcgccaagtggcggaccgccaccacgccttaccgggttgagtgggaggccgattttgagccgtatgttgttgtgagacgtgactgcccggagtacgaccggaggtttgtaggctttggctggaacaaagtggctcatatcatggagctggatgtgcaggagtatgagttcattgtgctgcccaacgcctacatgatccacatgcctcatgcccccagcttcgacattaccaagttccgttccaacaagcaataccgcatctgtctcaaaaccctcaaggaagagtttcagcaggacatgtcccgccgctacggctttgctgccctgaaatatctcacagccgagaacaacagctagcaccaagaagcccaccactagggggagacatgctgtaggggaagtgccactcgctgtttggggcccggccttcaaattcaaaattgagccatgctttttcggtttgtttttatttatctctttggcccagccaagctgccctcactacagagaccttggacaaggatccagccagtccctctctgccccacaaccctgcattcccagaggttagctatgcagcccacctagatgagtctcttcaagaatgggaaatcaaggggtgacagggagtaaaagggttatcatcttactgcaaagccacaagatcagggcagggctttaggatgttctggatgctttttaataattatgcttcccatcataactggggagaaagggaagtcagggttctaggggttattcgtcccaggaaatagaagtgaaattgtctttattaagtgaaaactttcccctttgccctgcaatgtagctgggcattcaaacggagggcaaaccgatgatctaaaccaaccacttggaaaaacccaatggggacattgtaaccagagggtcctggaggtggggttgatgggtttccttatccccaaagtcactcctgttttgttttgtttttctttgggggttttgtttatttttggggctggcaatccaaaatagaaaatctgatcctttgaggctctaaaggaaaatcagctgcctctaccaaccaccctctatcagcagtggcccaggaaggaggtcaagcatcttcggccgatatttaaacatgggcagcttccttcaggatgatcaccgaggctcccgtgactttgaactccctactctccagaatccaggggctatagcgatggggactgcggaattacgagggctggctgttttacaccggtcacattttctattggcagtgactgattcatgggaaagggctttgaaggaactacttcagtgcacacacaaggtacgaacctctcaggcctttcgaagaactttcataattcatgaaagcccagttctgaagattcacgtatccatctggagacctacaggaagaaagtgattgggttcctctggttcttgcctgcttcactgtggatgggaagaggtgacaacctcagtctccctttgggacctgtccaagggtaggcaaccaccttcaccttcacacagattgaggagacactggactttttacccattttctttaatcttcaatattaatattgtgtttacattgatgagaacaagagttaatgccctaccctctgctgggctgtttgtattgagttgcaatgtgaccagcgaaagctgcatttaataaatgaaagtacagactgtttcttccccattcccctcccactcttgcaggaagctactgagacacaccttgacatagagagctaaattgcagtggataaacagcaacttcacactttctgttcccccattctatttttctcatcatttga

SEQ ID NO: 11066 - protein, 704 aa, Homo sapiens
MLGICRGRRKFLAASLSLLCIPAITWIYLFSGSFEDGKPVSLSPLESQAHSPRYTASSQRERESLEVRMREVEEENRALRRQLSLAQGRAPSHRRGNHSKTYSMEEGTGDSENLRAGIVAGNSSECGQQPVVEKCETIHVAIVCAGYNASRDVVTLVKSVLFHRRNPLHFHLIADSIAEQILATLFQTWMVPAVRVDFYNADELKSEVSWIPNKHYSGIYGLMKLVLTKTLPANLERVIVLDTDITFATDIAELWAVFHKFKGQQVLGLVENQSDWYLGNLWKNHRPWPALGRGYNTGVILLLLDKLRKMKWEQMWRLTAERELMGMLSTSLADQDIFNAVIKQNPFLVYQLPCFWNVQLSDHTRSEQCYRDVSDLKLQKQLSELDEDDLCYEFRRERFTVHRTHLYFLHYEYEPAADSTDVTLVAQLSMDRLQMLEAICKHWEGPISLALYLSDAEAQQFLRYAQGSEVLMSRHNVGYHIVYKEGQFYPVNLLRNVAMKHISTPYMFLSDIDFLPMYGLYEYLRKSVIQLDLANTKKAMIVPAFETLRYRLSFPKSKAELLSMLDMGTLFTFRYHVWTKGHAPTNFAKWRTATTPYRVEWEADFEPYVVVRRDCPEYDRRFVGFGWNKVAHIMELDVQEYEFIVLPNAYMIHMPHAPSFDITKFRSNKQYRICLKTLKEEFQQDMSRRYGFAALKYLTAENNS

SEQ ID NO: 11067 - DNA, 4248 bp, Homo sapiens
agtctgctcctgccccgccgccgcgccggagcccgggcgcccgaagctgggggcgcggccgcgctcgtctcgccgggctgttcgcgggcaggccctgccctgaagggacgaatcggcttggagcgcgggaggtggagtcggccccggcggtcgctccctggacccaacccgaggctgacccaggcccctgcccatgcggggcgcccctggctcggaagagtcccccgggccgggagcagctccaggcagcggccccggaggaagaggaagaagggacagtgctcagcttgggggacccggaccctcgccgcggcatttggagccgggggcagtcccgaactctgtgcttggcaccgccgctccgagtagggcagcgcctgccgggaccctgacccggaccccctgcgcctcgtaggcggcggcgccgccgcgccaccctgttcttccgtgtctccctctgcctggcggcagtcacggccaagaacctacattaagaaacgcattcagatgcatcagccgtttgtaaagcacctgtcgtgagccagagagtattatgagggaggccgaggacttcatgctccggacagagaaacggcgctgggattagggattgccacttctgagaggatgctgggaatctgcagggggagacggaaattcttggctgcctcgttgagtcttctctgcatcccagccatcacctggatttacctgttttctgggagcttcgaagatggaaagcccgtgtctctgtcaccgctggagtcccaggcacacagccccaggtacacggcctccagccagcgggagcgcgagagcctggaggtgcgcatgcgcgaggtggaggaggagaaccgcgccctccgcaggcagctcagcctggcccagggccgagccccatcccatcgccgaggcaaccactccaagacctactccatggaggagggcactggagacagcgagaaccttcgggctggcatcgtggcaggcaacagctccgagtgtgggcagcagccggtcgtggagaaatgcgagacaatccacgttgctattgtctgcgccggatacaatgccagccgggatgtcgtcaccctggtcaaatccgtcctgttccatagacggaaccctctgcacttccaccttattgctgactccattgcggagcagatcctggccacgctcttccagacctggatggtgcccgctgtgcgtgtggacttctacaatgcagacgagctcaagtctgaagtttcctggatccccaataaacattactctgggatttatggtctgatgaagcttgtcctgaccaagactcttcctgccaacctggagagagtcatcgtccttgacacggatatcacctttgccactgacattgcagagctgtgggctgtgttccacaagttcaaaggtcagcaagtcctgggcttggtggagaaccagagtgactggtaccttggaaacctgtggaaaaatcaccgcccatggccagcccttggaagaggctacaacacaggggtgatcctgttacttctggataagctgcggaagatgaaatgggagcagatgtggaggctgaccgcagagagggagctcatgggcatgctctctacatccttagctgaccaggatattttcaatgccgtcatcaaacaaaaccccttccttgtgtaccagctcccctgcttctggaatgtgcagctgtcagaccacacccgctccgagcagtgctacagagacgtgtctgatctaaaggtcattcactggaactcccccaagaagctccgggtgaagaacaagcatgtggagttttttcgcaacctctacctgaccttcctggagtatgacggcaatcttctgaggcgggaactgtttggctgccccagtgaggctgatgtcaacagtgaaaacctccagaagcagctgtctgagctggacgaggacgacctgtgctatgagttccggcgagagcgcttcactgtccaccgcacccacctgtacttcctgcactacgagtatgagcctgcagcagacagcacggacgtcaccctggtcgctcagctgtccatggacaggctccagatgctggaggccatctgcaagcactgggaggggcccatcagcctggccctctacctgtcagacgccgaggcccagcagttcctccgctacgcacagggctctgaggtgcttatgagccgccacaacgtgggctaccacatcgtgtacaaggagggccagttctaccccgtgaacctgctgcgcaacgtggccatgaagcacatcagcactccctacatgttcctgtctgacattgacttcctgcccatgtatgggctctatgagtacctcaggaagtctgtcatccagctcgatcttgccaacaccaagaaagcaatgattgtccccgcgttcgagacactgcgctaccggctgtccttccccaagtcaaaagcggagttgctgtcaatgctggacatggggaccctcttcacattcaggtaccacgtctggacgaaaggccacgcacccacaaacttcgccaagtggcggaccgccaccacgccttaccgggttgagtgggaggccgattttgagccgtatgttgttgtgagacgtgactgcccggagtacgaccggaggtttgtaggctttggctggaacaaagtggctcatatcatggagctggatgtgcaggagtatgagttcattgtgctgcccaacgcctacatgatccacatgcctcatgcccccagcttcgacattaccaagttccgttccaacaagcaataccgcatctgtctcaaaaccctcaaggaagagtttcagcaggacatgtcccgccgctacggctttgctgccctgaaatatctcacagccgagaacaacagctagcaccaagaagcccaccactagggggagacatgctgtaggggaagtgccactcgctgtttggggcccggccttcaaattcaaaattgagccatgctttttcggtttgtttttatttatctctttggcccagccaagctgccctcactacagagaccttggacaaggatccagccagtccctctctgccccacaaccctgcattcccagaggttagctatgcagcccacctagatgagtctcttcaagaatgggaaatcaaggggtgacagggagtaaaagggttatcatcttactgcaaagccacaagatcagggcagggctttaggatgttctggatgctttttaataattatgcttcccatcataactggggagaaagggaagtcagggttctaggggttattcgtcccaggaaatagaagtgaaattgtctttattaagtgaaaactttcccctttgccctgcaatgtagctgggcattcaaacggagggcaaaccgatgatctaaaccaaccacttggaaaaacccaatggggacattgtaaccagagggtcctggaggtggggttgatgggtttccttatccccaaagtcactcctgttttgttttgtttttctttgggggttttgtttatttttggggctggcaatccaaaatagaaaatctgatcctttgaggctctaaaggaaaatcagctgcctctaccaaccaccctctatcagcagtggcccaggaaggaggtcaagcatcttcggccgatatttaaacatgggcagcttccttcaggatgatcaccgaggctcccgtgactttgaactccctactctccagaatccaggggctatagcgatggggactgcggaattacgagggctggctgttttacaccggtcacattttctattggcagtgactgattcatgggaaagggctttgaaggaactacttcagtgcacacacaaggtacgaacctctcaggcctttcgaagaactttcataattcatgaaagcccagttctgaagattcacgtatccatctggagacctacaggaagaaagtgattgggttcctctggttcttgcctgcttcactgtggatgggaagaggtgacaacctcagtctccctttgggacctgtccaagggtaggcaaccaccttcaccttcacacagattgaggagacactggactttttacccattttctttaatcttcaatattaatattgtgtttacattgatgagaacaagagttaatgccctaccctctgctgggctgtttgtattgagttgcaatgtgaccagcgaaagctgcatttaataaatgaaagtacagactgtttcttcccc

SEQ ID NO: 11068 - protein, 756 aa, Homo sapiens; identical to SEQ ID NO: 1718

SEQ ID NO: 11069 - DNA, 4029 bp, Homo sapiens
agtctgctcctgccccgccgccgcgccggagcccgggcgcccgaagctgggggcgcggccgcgctcgtctcgccgggctgttcgcgggcaggccctgccctgaagggacgaatcggcttggagcgcgggaggtggagtcggccccggcggtcgctccctggacccaacccgaggctgacccaggcccctgcccatgcggggcgcccctggctcggaagagtcccccgggccgggagcagctccaggcagcggccccggaggaagaggaagaagggacagtgctcagcttgggggacccggaccctcgccgcggcatttggagccgggggcagtcccgaactctgtgcttggcaccgccgctccgagtagggcagcgcctgccgggaccctgacccggaccccctgcgcctcgtaggcggcggcgccgccgcgccaccctgttcttccgtgtctccctctgcctggcggcagtcacggccaagagagtattatgagggaggccgaggacttcatgctccggacagagaaacggcgctgggattagggattgccacttctgagaggatgctgggaatctgcagggggagacggaaattcttggctgcctcgttgagtcttctctgcatcccagccatcacctggatttacctgttttctgggagcttcgaagatggaaagcccgtgtctctgtcaccgctggagtcccaggcacacagccccaggtacacggcctccagccagcgggagcgcgagagcctggaggtgcgcatgcgcgaggtggaggaggagaaccgcgccctccgcaggcagctcagcctggcccagggccgagccccatcccatcgccgaggcaaccactccaagacctactccatggaggagggcactggagacagcgagaaccttcgggctggcatcgtggcaggcaacagctccgagtgtgggcagcagccggtcgtggagaaatgcgagacaatccacgttgctattgtctgcgccggatacaatgccagccgggatgtcgtcaccctggtcaaatccgtcctgttccatagacggaaccctctgcacttccaccttattgctgactccattgcggagcagatcctggccacgctcttccagacctggatggtgcccgctgtgcgtgtggacttctacaatgcagacgagctcaagtctgaagtttcctggatccccaataaacattactctgggatttatggtctgatgaagcttgtcctgaccaagactcttcctgccaacctggagagagtcatcgtccttgacacggatatcacctttgccactgacattgcagagctgtgggctgtgttccacaagttcaaaggtcagcaagtcctgggcttggtggagaaccagagtgactggtaccttggaaacctgtggaaaaatcaccgcccatggccagcccttggaagaggctacaacacaggggtgatcctgttacttctggataagctgcggaagatgaaatgggagcagatgtggaggctgaccgcagagagggagctcatgggcatgctctctacatccttagctgaccaggatattttcaatgccgtcatcaaacaaaaccccttccttgtgtaccagctcccctgcttctggaatgtgcagctgtcagaccacacccgctccgagcagtgctacagagacgtgtctgatctaaagctccagaagcagctgtctgagctggacgaggacgacctgtgctatgagttccggcgagagcgcttcactgtccaccgcacccacctgtacttcctgcactacgagtatgagcctgcagcagacagcacggacgtcaccctggtcgctcagctgtccatggacaggctccagatgctggaggccatctgcaagcactgggaggggcccatcagcctggccctctacctgtcagacgccgaggcccagcagttcctccgctacgcacagggctctgaggtgcttatgagccgccacaacgtgggctaccacatcgtgtacaaggagggccagttctaccccgtgaacctgctgcgcaacgtggccatgaagcacatcagcactccctacatgttcctgtctgacattgacttcctgcccatgtatgggctctatgagtacctcaggaagtctgtcatccagctcgatcttgccaacaccaagaaagcaatgattgtccccgcgttcgagacactgcgctaccggctgtccttccccaagtcaaaagcggagttgctgtcaatgctggacatggggaccctcttcacattcaggtaccacgtctggacgaaaggccacgcacccacaaacttcgccaagtggcggaccgccaccacgccttaccgggttgagtgggaggccgattttgagccgtatgttgttgtgagacgtgactgcccggagtacgaccggaggtttgtaggctttggctggaacaaagtggctcatatcatggagctggatgtgcaggagtatgagttcattgtgctgcccaacgcctacatgatccacatgcctcatgcccccagcttcgacattaccaagttccgttccaacaagcaataccgcatctgtctcaaaaccctcaaggaagagtttcagcaggacatgtcccgccgctacggctttgctgccctgaaatatctcacagccgagaacaacagctagcaccaagaagcccaccactagggggagacatgctgtaggggaagtgccactcgctgtttggggcccggccttcaaattcaaaattgagccatgctttttcggtttgtttttatttatctctttggcccagccaagctgccctcactacagagaccttggacaaggatccagccagtccctctctgccccacaaccctgcattcccagaggttagctatgcagcccacctagatgagtctcttcaagaatgggaaatcaaggggtgacagggagtaaaagggttatcatcttactgcaaagccacaagatcagggcagggctttaggatgttctggatgctttttaataattatgcttcccatcataactggggagaaagggaagtcagggttctaggggttattcgtcccaggaaatagaagtgaaattgtctttattaagtgaaaactttcccctttgccctgcaatgtagctgggcattcaaacggagggcaaaccgatgatctaaaccaaccacttggaaaaacccaatggggacattgtaaccagagggtcctggaggtggggttgatgggtttccttatccccaaagtcactcctgttttgttttgtttttctttgggggttttgtttatttttggggctggcaatccaaaatagaaaatctgatcctttgaggctctaaaggaaaatcagctgcctctaccaaccaccctctatcagcagtggcccaggaaggaggtcaagcatcttcggccgatatttaaacatgggcagcttccttcaggatgatcaccgaggctcccgtgactttgaactccctactctccagaatccaggggctatagcgatggggactgcggaattacgagggctggctgttttacaccggtcacattttctattggcagtgactgattcatgggaaagggctttgaaggaactacttcagtgcacacacaaggtacgaacctctcaggcctttcgaagaactttcataattcatgaaagcccagttctgaagattcacgtatccatctggagacctacaggaagaaagtgattgggttcctctggttcttgcctgcttcactgtggatgggaagaggtgacaacctcagtctccctttgggacctgtccaagggtaggcaaccaccttcaccttcacacagattgaggagacactggactttttacccattttctttaatcttcaatattaatattgtgtttacattgatgagaacaagagttaatgccctaccctctgctgggctgtttgtattgagttgcaatgtgaccagcgaaagctgcatttaataaatgaaagtacagactgtttcttcccc

SEQ ID NO: 11070 - protein, 704 aa, Homo sapiens; identical to SEQ ID NO: 11066

SEQ ID NO: 11071 - DNA, 4185 bp, Homo sapiens
agtctgctcctgccccgccgccgcgccggagcccgggcgcccgaagctgggggcgcggccgcgctcgtctcgccgggctgttcgcgggcaggccctgccctgaagggacgaatcggcttggagcgcgggaggtggagtcggccccggcggtcgctccctggacccaacccgaggctgacccaggcccctgcccatgcggggcgcccctggctcggaagagtcccccgggccgggagcagctccaggcagcggccccggaggaagaggaagaagggacagtgctcagcttgggggacccggaccctcgccgcggcatttggagccgggggcagtcccgaactctgtgcttggcaccgccgctccgagtagggcagcgcctgccgggaccctgacccggaccccctgcgcctcgtaggcggcggcgccgccgcgccaccctgttcttccgtgtctccctctgcctggcggcagtcacggccaagagagtattatgagggaggccgaggacttcatgctccggacagagaaacggcgctgggattagggattgccacttctgagaggatgctgggaatctgcagggggagacggaaattcttggctgcctcgttgagtcttctctgcatcccagccatcacctggatttacctgttttctgggagcttcgaagatggaaagcccgtgtctctgtcaccgctggagtcccaggcacacagccccaggtacacggcctccagccagcgggagcgcgagagcctggaggtgcgcatgcgcgaggtggaggaggagaaccgcgccctccgcaggcagctcagcctggcccagggccgagccccatcccatcgccgaggcaaccactccaagacctactccatggaggagggcactggagacagcgagaaccttcgggctggcatcgtggcaggcaacagctccgagtgtgggcagcagccggtcgtggagaaatgcgagacaatccacgttgctattgtctgcgccggatacaatgccagccgggatgtcgtcaccctggtcaaatccgtcctgttccatagacggaaccctctgcacttccaccttattgctgactccattgcggagcagatcctggccacgctcttccagacctggatggtgcccgctgtgcgtgtggacttctacaatgcagacgagctcaagtctgaagtttcctggatccccaataaacattactctgggatttatggtctgatgaagcttgtcctgaccaagactcttcctgccaacctggagagagtcatcgtccttgacacggatatcacctttgccactgacattgcagagctgtgggctgtgttccacaagttcaaaggtcagcaagtcctgggcttggtggagaaccagagtgactggtaccttggaaacctgtggaaaaatcaccgcccatggccagcccttggaagaggctacaacacaggggtgatcctgttacttctggataagctgcggaagatgaaatgggagcagatgtggaggctgaccgcagagagggagctcatgggcatgctctctacatccttagctgaccaggatattttcaatgccgtcatcaaacaaaaccccttccttgtgtaccagctcccctgcttctggaatgtgcagctgtcagaccacacccgctccgagcagtgctacagagacgtgtctgatctaaaggtcattcactggaactcccccaagaagctccgggtgaagaacaagcatgtggagttttttcgcaacctctacctgaccttcctggagtatgacggcaatcttctgaggcgggaactgtttggctgccccagtgaggctgatgtcaacagtgaaaacctccagaagcagctgtctgagctggacgaggacgacctgtgctatgagttccggcgagagcgcttcactgtccaccgcacccacctgtacttcctgcactacgagtatgagcctgcagcagacagcacggacgtcaccctggtcgctcagctgtccatggacaggctccagatgctggaggccatctgcaagcactgggaggggcccatcagcctggccctctacctgtcagacgccgaggcccagcagttcctccgctacgcacagggctctgaggtgcttatgagccgccacaacgtgggctaccacatcgtgtacaaggagggccagttctaccccgtgaacctgctgcgcaacgtggccatgaagcacatcagcactccctacatgttcctgtctgacattgacttcctgcccatgtatgggctctatgagtacctcaggaagtctgtcatccagctcgatcttgccaacaccaagaaagcaatgattgtccccgcgttcgagacactgcgctaccggctgtccttccccaagtcaaaagcggagttgctgtcaatgctggacatggggaccctcttcacattcaggtaccacgtctggacgaaaggccacgcacccacaaacttcgccaagtggcggaccgccaccacgccttaccgggttgagtgggaggccgattttgagccgtatgttgttgtgagacgtgactgcccggagtacgaccggaggtttgtaggctttggctggaacaaagtggctcatatcatggagctggatgtgcaggagtatgagttcattgtgctgcccaacgcctacatgatccacatgcctcatgcccccagcttcgacattaccaagttccgttccaacaagcaataccgcatctgtctcaaaaccctcaaggaagagtttcagcaggacatgtcccgccgctacggctttgctgccctgaaatatctcacagccgagaacaacagctagcaccaagaagcccaccactagggggagacatgctgtaggggaagtgccactcgctgtttggggcccggccttcaaattcaaaattgagccatgctttttcggtttgtttttatttatctctttggcccagccaagctgccctcactacagagaccttggacaaggatccagccagtccctctctgccccacaaccctgcattcccagaggttagctatgcagcccacctagatgagtctcttcaagaatgggaaatcaaggggtgacagggagtaaaagggttatcatcttactgcaaagccacaagatcagggcagggctttaggatgttctggatgctttttaataattatgcttcccatcataactggggagaaagggaagtcagggttctaggggttattcgtcccaggaaatagaagtgaaattgtctttattaagtgaaaactttcccctttgccctgcaatgtagctgggcattcaaacggagggcaaaccgatgatctaaaccaaccacttggaaaaacccaatggggacattgtaaccagagggtcctggaggtggggttgatgggtttccttatccccaaagtcactcctgttttgttttgtttttctttgggggttttgtttatttttggggctggcaatccaaaatagaaaatctgatcctttgaggctctaaaggaaaatcagctgcctctaccaaccaccctctatcagcagtggcccaggaaggaggtcaagcatcttcggccgatatttaaacatgggcagcttccttcaggatgatcaccgaggctcccgtgactttgaactccctactctccagaatccaggggctatagcgatggggactgcggaattacgagggctggctgttttacaccggtcacattttctattggcagtgactgattcatgggaaagggctttgaaggaactacttcagtgcacacacaaggtacgaacctctcaggcctttcgaagaactttcataattcatgaaagcccagttctgaagattcacgtatccatctggagacctacaggaagaaagtgattgggttcctctggttcttgcctgcttcactgtggatgggaagaggtgacaacctcagtctccctttgggacctgtccaagggtaggcaaccaccttcaccttcacacagattgaggagacactggactttttacccattttctttaatcttcaatattaatattgtgtttacattgatgagaacaagagttaatgccctaccctctgctgggctgtttgtattgagttgcaatgtgaccagcgaaagctgcatttaataaatgaaagtacagactgtttcttcccc

SEQ ID NO: 11072 - protein, 756 aa, Homo sapiens; identical to SEQ ID NO: 1718

SEQ ID NO: 11073 - DNA, 709 bp, Homo sapiens
acttgctctgggatgtaagatctaattctatgctggctcccacatacatgcccggcagttgatgccagctatcaataagaaggctcacgtttttgccactccagaagtctgcttgagagtctttacaacatgctggcttcccccaaagtgagtggtcccaaagacagcaaggtggaggcaaggttatcttgaaaacttggcctcagaagtaacatggcatcattcctgcaacatcttattggttatatagaattgctgagttcctacatagtatacatattttttaatcccctgggaatatttaagcgtccttgatctggaagcaacatggaatgatggcacgagcactgtcttcaatacaagctggagtgtggcaattcccttctctgaatttcaggttttgcatctgtaaagcagacacaaggcggccgggcgcagtggctcacgcctgtaattccaacactttgggaggccaaggggggcagatcacctgagctcgggagtttgagaccaccctgaccaacacggagaaatcccatctctactacaaatacaaaattagccaggcatggtggtgcatgcctgtaatcccagttacttgggaggctgaggcaggagaatcgcttgaacccaggtggcggaggttgcggtgagtcgagatcgcaccactgcactccagcctaggcaacaagaatgaaactgtcacaaa

SEQ ID NO: 11074 - protein, 33 aa, Homo sapiens
MASFLQHLIGYIELLSSYIVYIFFNPLGIFKRP

SEQ ID NO: 11075 - DNA, 518 bp, Homo sapiens
cccggcagttgatgccagctatcaataagaaggctcacgtttttgccactccagaagtctgcttgagagtctttacaacatgctggcttcccccaaagtgagtggtcccaaagacagcaaggtggaggcaaggttatcttgaaaacttggcctcagaagtaacatggcatcattcctgcaacatcttattggttatatagaatgatgacaaaggagaagtgaaccaaggggaatgtgatcgtggatctacagacacgtccctcctcctatcggtggcacaaaaccccttcctctctcatcgcccagcaagaagcatcctctatttagctttgcgaagcttgaggggattggtcactggagcatttacagactgcctgaacatccttcagtactttatgttatgaaatggagcatttcaaagcactgggaattctgatttgtgaactggactgttacagtggcttaatttcctgaaatatagctgccttcttcactaatagatttttcaatgcactgag

SEQ ID NO: 11076 - protein, 34 aa, Homo sapiens
TKGNVIVDLQTRPSSYRWHKTPSSLIAQQEASSI

SEQ ID NO: 11077 - DNA, 2346 bp, Homo sapiens
gagtgcgtcacgtgacgggtcggtggcgctggcggttgctgtcagctgattcccggggttggtggcagcggcggtagcagcaatggactttctcctggggaacccgttcagctctccagtgggacagcgcatcgagaaagccacagatggctccctgcagagcgaggactgggccctcaacatggagatctgcgacatcatcaacgagacggaggaaggtcccaaagatgccctccgagcagtaaagaagagaatcgtggggaataagaacttccacgaggtgatgctggctctcacagtcttagaaacctgtgtcaagaactgcgggcaccgcttccacgtgctggtggccagccaggacttcgtggagagtgtgctggtgaggaccatcctgcccaagaacaacccacccaccatcgtgcatgacaaagtgctcaacctcatccagtcctgggctgacgcgttccgcagctcgcccgatctgacaggtgtggtcaccatctatgaggacctgcggaggaaaggcctggagttccccatgactgacctggacatgctgtcacccatccacacaccccagaggaccgtgttcaactcagagacacaatcaggacaggattctgtgggcactgactccagccagcaagaggactctggccagcatgctgcccctctgcccgccccgcccatactctccggtgacacgcccatagcaccaaccccggaacagattgggaagctgcgcagtgagctggagatggtgagtgggaacgtgagggtgatgtcggagatgctgacggagctggtgcccacccaggccgagcccgcagacctggagctgctgcaggagctcaaccgcacgtgccgagccatgcagcagcgggtcctggagctcatccctcagatcgccaatgagcagctgacagaggagctgctcatcgtcaatgacaatctcaacaatgtgttcctgcgccatgaacggtttgaacggttccgaacaggccagaccaccaaggccccaagtgaggccgagccggcagctgacctgatcgacatgggccctgacccagcagccaccggcaacctctcatcccagctggcaggaatgaacctgggctccagcagtgtgagagctggcctgcagtctctggaggcctctggtcgactggaagatgagtttgacatgtttgcgctgacacggggcagctcactggctgaccaacggaaagaggtaaaatacgaagccccccaagcaacagacggcctggctggagccctggacgcccggcagcagagcactggcgcgatcccagtcacccaggcctgcctcatggaggacatcgagcagtggctgtccactgacgtgggtaatgatgcggaagagcctaagggggtcaccagcgaagaatttgacaaattcctggaagaacgggccaaagccgcggaccgattgcccaacctctccagcccctcagctgaggggcccccgggtcccccatctggcccagcgccccggaagaagacccaggagaaagatgatgacatgctgtttgccttatgagtgtggggtctggcaccctgcagcccaggtccccactgctctcacacccttaggctgggacctccctccctcctctggtgttaaggctgctttgggggtggcttgttacccccttttcctcctctttgaagacggagctgccccagctgtggctgggggtgtggaggcagtgggatgaactgggggacaggtctgcgctgcagtgggatctggctgctctgcctcctttcccaccccagctgaccatgagactttgctgagaagtggaggccccaggacaggctggctggctggctggctgcttgacccagtgtgactctccttcactgagtgataccctgctccgggcccatgccccaaggagcccttcagagcccacactgccagtcgaggcctggctggaggctggccacagtggaaattctgccgagcctcttgtcccttccctgctctgctgcatggggccccatggctttggctggccactgagggtagggtgtggaggtgtggaggccccctgaggagctgcggcggcccaggtacgaagctgcaactctgcgcgcagtgggcgagatctcatcagccccaggctgcaggtgaggcttcaggggatgctggggccccactgcccctccgctgccttgccctccatccttcctctgttccttctggccgggcaccacagcactggggctcacctcttggttgatcctcttgtactgggagaggtgccttttgtatccccaattaaaggtagaaaaccaccctgctagcagcattgtcaa

SEQ ID NO: 11078 - protein, 492 aa, Homo sapiens; identical to SEQ ID NO: 1722

SEQ ID NO: 11079 - DNA, 1345 bp, Homo sapiens
gagtgcgtcacgtgacgggtcggtggcgctggcggttgctgtcagctgattcccggggttggtggcagcggcggtagcagcaatggactttctcctggggaacccgttcagctctccagtgggacagcgcatcgagaaagccacagatggctccctgcagagcgaggactgggccctcaacatggagatctgcgacatcatcaacgagacggaggaaggtcccaaagatgccctccgagcagtaaagaagagaatcgtggggaataagaacttccacgaggtgatgctggctctcacagtcttagaaacctgtgtcaagaactgcgggcaccgcttccacgtgctggtggccagccaggacttcgtggagagtgtgctggtgaggaccatcctgcccaagaacaacccacccaccatcgtgcatgacaaagtgctcaacctcatccagtcctgggctgacgcgttccgcagctcgcccgatctgacaggtgtggtcaccatctatgaggacctgcggaggaaaggcctggagttccccatgactgacctggacatgctgtcacccatccacacaccccagaggaccgtgttcaactcagagacacaatcaggacaggattctgtgggcactgactccagccagcaagaggactctggccagcatgctgcccctctgcccgccccgcccatactctccggtgacacgcccatagcaccaaccccggaacagattgggaagctgcgcagtgagctggagatggtgagtgggaacgtgagggtgatgtcggagatgctgacggagctggtgcccacccaggccgagcccgcagacctggagctgctgcaggagctcaaccgcacgtgccgagccatgcagcagcgggtcctggatgataccctgctccgggcccatgccccaaggagcccttcagagcccacactgccagtcgaggcctggctggaggctggccacagtggaaattctgccgagcctcttgtcccttccctgctctgctgcatggggccccatggctttggctggccactgagggtagggtgtggaggtgtggaggccccctgaggagctgcggcggcccaggtacgaagctgcaactctgcgcgcagtgggcgagatctcatcagccccaggctgcaggtgaggcttcaggggatgctggggccccactgcccctccgctgccttgccctccatccttcctctgttccttctggccgggcaccacagcactggggctcacctcttggttgatcctcttgtactgggagaggtgccttttgtatccccaattaaaggtagaaaaccaccctgctagcagcattgtcaa

SEQ ID NO: 11080 - protein, 332 aa, Homo sapiens
MDFLLGNPFSSPVGQRIEKATDGSLQSEDWALNMEICDIINETEEGPKDALRAVKKRIVGNKNFHEVMLALTVLETCVKNCGHRFHVLVASQDFVESVLVRTILPKNNPPTIVHDKVLNLIQSWADAFRSSPDLTGVVTIYEDLRRKGLEFPMTDLDMLSPIHTPQRTVFNSETQSGQDSVGTDSSQQEDSGQHAAPLPAPPILSGDTPIAPTPEQIGKLRSELEMVSGNVRVMSEMLTELVPTQAEPADLELLQELNRTCRAMQQRVLDDTLLRAHAPRSPSEPTLPVEAWLEAGHSGNSAEPLVPSLLCCMGPHGFGWPLRVGCGGVEAP

SEQ ID NO: 11081 - DNA, 2258 bp, Homo sapiens
acgtgacgggtcggtggcgctggcggttgctgtcagctgattcccggggttggtggcagcggcggtagcagcaatggactttctcctggggaacccgttcagctctccagtgggacagcgcatcgagaaagccacagatggctccctgcagagcgaggactgggccctcaacatggagatctgcgacatcatcaacgagacggaggaagggtcttagaaacctgtgtcaagaactgcgggcaccgcttccacgtgctggtggccagccaggacttcgtggagagtgtgctggtgaggaccatcctgcccaagaacaacccacccaccatcgtgcatgacaaagtgctcaacctcatccagtcctgggctgacgcgttccgcagctcgcccgatctgacaggtgtggtcaccatctatgaggacctgcggaggaaaggcctggagttccccatgactgacctggacatgctgtcacccatccacacaccccagaggaccgtgttcaactcagagacacaatcaggacaggattctgtgggcactgactccagccagcaagaggactctggccagcatgctgcccctctgcccgccccgcccatactctccggtgacacgcccatagcaccaaccccggaacagattgggaagctgcgcagtgagctggagatggtgagtgggaacgtgagggtgatgtcggagatgctgacggagctggtgcccacccaggccgagcccgcagacctggagctgctgcaggagctcaaccgcacgtgccgagccatgcagcagcgggtcctggagctcatccctcagatcgccaatgagcagctgacagaggagctgctcatcgtcaatgacaatctcaacaatgtgttcctgcgccatgaacggtttgaacggttccgaacaggccagaccaccaaggccccaagtgaggccgagccggcagctgacctgatcgacatgggccctgacccagcagccaccggcaacctctcatcccagctggcaggaatgaacctgggctccagcagtgtgagagctggcctgcagtctctggaggcctctggtcgactggaagatgagtttgacatgtttgcgctgacacggggcagctcactggctgaccaacggaaagaggtaaaatacgaagccccccaagcaacagacggcctggctggagccctggacgcccggcagcagagcactggcgcgatcccagtcacccaggcctgcctcatggaggacatcgagcagtggctgtccactgacgtgggtaatgatgcggaagagcctaagggggtcaccagcgaagaatttgacaaattcctggaagaacgggccaaagccgcggaccgattgcccaacctctccagcccctcagctgaggggcccccgggtcccccatctggcccagcgccccggaagaagacccaggagaaagatgatgacatgctgtttgccttatgagtgtggggtctggcaccctgcagcccaggtccccactgctctcacacccttaggctgggacctccctccctcctctggtgttaaggctgctttgggggtggcttgttacccccttttcctcctctttgaagacggagctgccccagctgtggctgggggtgtggaggcagtgggatgaactgggggacaggtctgcgctgcagtgggatctggctgctctgcctcctttcccaccccagctgaccatgagactttgctgagaagtggaggccccaggacaggctggctggctggctggctgcttgacccagtgtgactctccttcactgagtgataccctgctccgggcccatgccccaaggagcccttcagagcccacactgccagtcgaggcctggctggaggctggccacagtggaaattctgccgagcctcttgtcccttccctgctctgctgcatggggccccatggctttggctggccactgagggtagggtgtggaggtgtggaggccccctgaggagctgcggcggcccaggtacgaagctgcaactctgcgcgcagtgggcgagatctcatcagccccaggctgcaggtgaggcttcaggggatgctggggccccactgcccctccgctgccttgccctccatccttcctctgttccttctggccgggcaccacagcactggggctcacctcttggttgatcctcttgtactgggagaggtgccttttgtatccccaattaaaggtagaaaaccaccctgctagcagcattgtcaa

SEQ ID NO: 11082 - protein, 340 aa, Homo sapiens
MTDLDMLSPIHTPQRTVFNSETQSGQDSVGTDSSQQEDSGQHAAPLPAPPILSGDTPIAPTPEQIGKLRSELEMVSGNVRVMSEMLTELVPTQAEPADLELLQELNRTCRAMQQRVLELIPQIANEQLTEELLIVNDNLNNVFLRHERFERFRTGQTTKAPSEAEPAADLIDMGPDPAATGNLSSQLAGMNLGSSSVRAGLQSLEASGRLEDEFDMFALTRGSSLADQRKEVKYEAPQATDGLAGALDARQQSTGAIPVTQACLMEDIEQWLSTDVGNDAEEPKGVTSEEFDKFLEERAKAADRLPNLSSPSAEGPPGPPSGPAPRKKTQEKDDDMLFAL

SEQ ID NO: 11083 - DNA, 840 bp, Homo sapiens
gctggcggttgctgtcagctgattcccggggttggtggcagcggcggtagcagcaatggactttctcctggggaacccgttcagctctccagtgggacagcgcatcgagaaagccacagatggctccctgcagagcgaggactgggccctcaacatggagatctgcgacatcatcaacgagacggaggaaggtcccaaagatgccctccgagcagtaaagaagagaatcgtggggaataagaacttccacgaggtgatgctggctctcacagtgagtgccccatctgtctgtcctgtggcaggactacggtccactgaaagtcacctcccctcagacccagcaggactcccagcctcctctgagctcctcatttgagagctggaaaggtctgtaggcaacgcactgtcctgtctacactgcaggcggatgcagaatggcaagaggccatttggaaaggttctccccaatcccccagcatgggaacagacgcttacatcactccagaaccactggcagggagagcctgggccaaaggacctgtgggtgacattgaagctcagtaaacccaggcctccgcgggggcagggaggccggctgactgagttgggtgctgctcggcactttggtgctctggcaaatgaatgtaaaataaataccagtggctgagaacagtcttgcccacaccactgaaccagcccagatctcagggcggccagacacacgtgggcctcctagccgtcagcatgggtttggctggggaagatataaatgctgtcccaccctcctccacaagcagcatttatatccaggtgaattggcttaagcaaaaagcaaaggca

SEQ ID NO: 11084 - protein, 106 aa, Homo sapiens
MDFLLGNPFSSPVGQRIEKATDGSLQSEDWALNMEICDIINETEEGPKDALRAVKKRIVGNKNFHEVMLALTVSAPSVCPVAGLRSTESHLPSDPAGLPASSELLI

SEQ ID NO: 11085 - DNA, 531 bp, Homo sapiens
agctgattcccggggttggtggcagcggcggtagcagcaatggactttctcctggggaacccgttcagctctccagtgggacagcgcatcgagaaagccacagatggctccctgcagagcgaggactgggccctcaacatggagatctgcgacatcatcaacgagacggaggaagggtaagggccccccaaggagaggttgggggcagagacggccatcccaccacgcagcacactcctgcacccttccagggagcccctgccccagccccattgctgccatagccaccaagtctgacccaacccgcttggctgcagaggccatctgagcccctagtacctgagccccatccaaggtaggaattcacagctggcccctgggggctgccaccccaccccgcctctcttagtggcagcccagattccacacggatctggaagcccagccttgtgtgcagcatctgcctaggatgaggcaagctggagactcttaatcagaagttgaccccaagcgccatctgcattctgcagg

SEQ ID NO: 11086 - protein, 46 aa, Homo sapiens
MDFLLGNPFSSPVGQRIEKATDGSLQSEDWALNMEICDIINETEEG

SEQ ID NO: 11087 - DNA, 1901 bp, Homo sapiens
agctgattcccggggttggtggcagcggcggtagcagcaatggactttctcctggggaacccgttcagctctccagtgggacagcgcatcgagaaagccacagatggctccctgcagagcgaggactgggccctcaacatggagatctgcgacatcatcaacgagacggaggaaggtcccaaagatgccctccgagcagtaaagaagagaatcgtggggaataagaacttccacgaggtgatgctggctctcacagtcttagaaacctgtgtcaagaactgcgggcaccgcttccacgtgctggtggccagccaggacttcgtggagagtgtgctggtgaggaccatcctgcccaagaacaacccacccaccgccgagcccgcagacctggagctgctgcaggagctcaaccgcacgtgccgagccatgcagcagcgggtcctggagctcatccctcagatcgccaatgagcagctgacagaggagctgctcatcgtcaatgacaatctcaacaatgtgttcctgcgccatgaacggtttgaacggttccgaacaggccagaccaccaaggccccaagtgaggccgagccggcagctgacctgatcgacatgggccctgacccagcagccaccggcaacctctcatcccagctggcaggaatgaacctgggctccagcagtgtgagagctggcctgcagtctctggaggcctctggtcgactggaagatgagtttgacatgtttgcgctgacacggggcagctcactggctgaccaacggaaagaggtaaaatacgaagccccccaagcaacagacggcctggctggagccctggacgcccggcagcagagcactggcgcgatcccagtcacccaggcctgcctcatggaggacatcgagcagtggctgtccactgacgtgggtaatgatgcggaagagcctaagggggtcaccagcgaagaatttgacaaattcctggaagaacgggccaaagccgcggaccgattgcccaacctctccagcccctcagctgaggggcccccgggtcccccatctggcccagcgccccggaagaagacccaggagaaagatgatgacatgctgtttgccttatgagtgtggggtctggcaccctgcagcccaggtccccactgctctcacacccttaggctgggacctccctccctcctctggtgttaaggctgctttgggggtggcttgttacccccttttcctcctctttgaagacggagctgccccagctgtggctgggggtgtggaggcagtgggatgaactgggggacaggtctgcgctgcagtgggatctggctgctctgcctcctttcccaccccagctgaccatgagactttgctgagaagtggaggccccaggacaggctggctggctggctggctgcttgacccagtgtgactctccttcactgagtgataccctgctccgggcccatgccccaaggagcccttcagagcccacactgccagtcgaggcctggctggaggctggccacagtggaaattctgccgagcctcttgtcccttccctgctctgctgcatggggccccatggctttggctggccactgagggtagggtgtggaggtgtggaggccccctgaggagctgcggcggcccaggtacgaagctgcaactctgcgcgcagtgggcgagatctcatcagccccaggctgcaggtgaggcttcaggggatgctggggccccactgcccctccgctgccttgccctccatccttcctctgttccttctggccgggcaccacagcactggggctcacctcttggttgatcctcttgtactgggagaggtgccttttgtatccccaattaaaggtagaaaaccaccctgctagcagcattgtcaa

SEQ ID NO: 11088 - protein, 358 aa, Homo sapiens
MDFLLGNPFSSPVGQRIEKATDGSLQSEDWALNMEICDIINETEEGPKDALRAVKKRIVGNKNFHEVMLALTVLETCVKNCGHRFHVLVASQDFVESVLVRTILPKNNPPTAEPADLELLQELNRTCRAMQQRVLELIPQIANEQLTEELLIVNDNLNNVFLRHERFERFRTGQTTKAPSEAEPAADLIDMGPDPAATGNLSSQLAGMNLGSSSVRAGLQSLEASGRLEDEFDMFALTRGSSLADQRKEVKYEAPQATDGLAGALDARQQSTGAIPVTQACLMEDIEQWLSTDVGNDAEEPKGVTSEEFDKFLEERAKAADRLPNLSSPSAEGPPGPPSGPAPRKKTQEKDDDMLFAL

SEQ ID NO: 11089 - DNA, 560 bp, Homo sapiens
gattcccggggttggtggcagcggcggtagcagcaatggactttctcctggggaacccgttcagctctccagtgggacagcgcatcgagaaagccacagatggctccctgcagagcgaggactgggccctcaacatggagatctgcgacatcatcaacgagacggaggaaggtgactctgctgctggaggtccaggggccacaggttgtgagtccctgctaagcaatgggctaggaagattctgatgtgatcagaacctggctggatacacaaaacagtcccaaagatgccctccgagcagtaaagaagagaatcgtggggaataagaacttccacgaggtgatgctggctctcacagtcttagaaacctgtgtcaagaactgcgggcaccgcttccacgtgctggtggccagccaggacttcgtggagagtgtgctggtgaggaccatcctgcccaagaacaacccacccaccatcgtgcatgacaaagtgctcaacctcatccagtcctgggctgacgcgttccgcagctcgcccgatctgacaggtgtggtcaccat

SEQ ID NO: 11090 - protein, 71 aa, Homo sapiens
MLALTVLETCVKNCGHRFHVLVASQDFVESVLVRTILPKNNPPTIVHDKVLNLIQSWADAFRSSPDLTGVV

SEQ ID NO: 11091 - DNA, 2447 bp, Homo sapiens
gattcccggggttggtggcagcggcggtagcagcaatggactttctcctggggaacccgttcagctctccagtgggacagcgcatcgagaaagccacagatggctccctgcagagcgaggactgggccctcaacatggagatctgcgacatcatcaacgagacggaggaaggctaagcaatgggctaggaagattctgatgtgatcagaacctggctggatacacaaaacagtcccaaagatgccctccgagcagtaaagaagagaatcgtggggaataagaacttccacgaggtgatgctggctctcacagtcttagaaacctgtgtcaagaactgcgggcaccgcttccacgtgctggtggccagccaggacttcgtggagagtgtgctggtgaggaccatcctgcccaagaacaacccacccaccatcgtgcatgacaaagtgctcaacctcatccagtcctgggctgacgcgttccgcagctcgcccgatctgacaggtgtggtcaccatctatgaggacctgcggaggaaaggcctggagttccccatgactgacctggacatgctgtcacccatccacacaccccagaggaccgtgttcaactcagagacacaatcaggacaggattctgtgggcactgactccagccagcaagaggactctggccagcatgctgcccctctgcccgccccgcccatactctccggtgacacgcccatagcaccaaccccggaacagattgggaagctgcgcagtgagctggagatggtgagtgggaacgtgagggtgatgtcggagatgctgacggagctggtgcccacccaggccgagcccgcagacctggagctgctgcaggagctcaaccgcacgtgccgagccatgcagcagcgggtcctggagctcatccctcagatcgccaatgagcagctgacagaggagctgctcatcgtcaatgacaatctcaacaatgtgttcctgcgccatgaacgacctgcccaccttgtatcattctgttcaagagtcacatccccaagagagacttggattggctgagcttcattgtgcctaccagctggggtttgaacggttccgaacaggccagaccaccaaggccccaagtgaggccgagccggcagctgacctgatcgacatgggccctgacccagcagccaccggcaacctctcatcccagctggcaggaatgaacctgggctccagcagtgtgagagctggcctgcagtctctggaggcctctggtcgactggaagatgagtttgacatgtttgcgctgacacggggcagctcactggctgaccaacggaaagaggtaaaatacgaagccccccaagcaacagacggcctggctggagccctggacgcccggcagcagagcactggcgcgatcccagtcacccaggcctgcctcatggaggacatcgagcagtggctgtccactgacgtgggtaatgatgcggaagagcctaagggggtcaccagcgaagaatttgacaaattcctggaagaacgggccaaagccgcggaccgattgcccaacctctccagcccctcagctgaggggcccccgggtcccccatctggcccagcgccccggaagaagacccaggagaaagatgatgacatgctgtttgccttatgagtgtggggtctggcaccctgcagcccaggtccccactgctctcacacccttaggctgggacctccctccctcctctggtgttaaggctgctttgggggtggcttgttacccccttttcctcctctttgaagacggagctgccccagctgtggctgggggtgtggaggcagtgggatgaactgggggacaggtctgcgctgcagtgggatctggctgctctgcctcctttcccaccccagctgaccatgagactttgctgagaagtggaggccccaggacaggctggctggctggctggctgcttgacccagtgtgactctccttcactgagtgataccctgctccgggcccatgccccaaggagcccttcagagcccacactgccagtcgaggcctggctggaggctggccacagtggaaattctgccgagcctcttgtcccttccctgctctgctgcatggggccccatggctttggctggccactgagggtagggtgtggaggtgtggaggccccctgaggagctgcggcggcccaggtacgaagctgcaactctgcgcgcagtgggcgagatctcatcagccccaggctgcaggtgaggcttcaggggatgctggggccccactgcccctccgctgccttgccctccatccttcctctgttccttctggccgggcaccacagcactggggctcacctcttggttgatcctcttgtactgggagaggtgccttttgtatccccaattaaaggtagaaaaccaccctgctagcagcattgtcaa

SEQ ID NO: 11092 - protein, 253 aa, Homo sapiens
MLALTVLETCVKNCGHRFHVLVASQDFVESVLVRTILPKNNPPTIVHDKVLNLIQSWADAFRSSPDLTGVVTIYEDLRRKGLEFPMTDLDMLSPIHTPQRTVFNSETQSGQDSVGTDSSQQEDSGQHAAPLPAPPILSGDTPIAPTPEQIGKLRSELEMVSGNVRVMSEMLTELVPTQAEPADLELLQELNRTCRAMQQRVLELIPQIANEQLTEELLIVNDNLNNVFLRHERPAHLVSFCSRVTSPRETWIG

SEQ ID NO: 11093 - DNA, 229 bp, Homo sapiens
aaaaaaaaaaaaaggtggacaggtgtttgtggacaagtgtttgagctgatgtatttattgatggcagcacccctggaaaggagatacagggcggctggaaggaggggccctcataaacatcctggaagaagacagctgagggcacaggcccttaggagcctgccttgtgtttgagaggaggacgagagaaggctcagatggcatgagaccaggagaacagggaggaagg

SEQ ID NO: 11094 - protein, 41 aa, Homo sapiens
MYLLMAAPLERRYRAAGRRGPHKHPGRRQLRAQALRSLPCV

SEQ ID NO: 11095 - DNA, 3110 bp, Homo sapiens
tacacctacacacacccttacacacaccacacctacacactcatacacctacacacacaccacacacacatctacacccaccacacctacacacacacccctacacctacacatacacacctacacacaccacacacctacacctacccacacctacacctacacatacacacctacattcatacacctacatacacacccctgcatataccacccctacacactcatacacctacacacctgcacacacacccctacacacaccacacacatctacacacaccacctacacacaccacatacatctatacctacacaacctacacctacacatacaaacctacactcatacacctacacacacacctacactcatacacctacatacacacccttacacacctacacacacccctacacacacacgcctcccaaagtggcagcaggcctcctgacccgaaaggcgcacccctgttagaagccgcgccctccagtggccctggcgctgccgtccctccgccatcagcgtgactctctctcacccagatgggaggcggctgcgggaaaagcctcagtgactggatggtgagacaaggcatggtgagcaggggccaggcccggccacccggaaagctgggggtgctcgcagggctcctgccaggcatgggcgtggggcaccgtgctgctctccaagggagtgggacccaggagaaggcccagaggagcaaggaggggcagctgagggtcttgcgggaccccagggctcaggctgtttccgggttggcccggccagcccagcttccgcagctcctctgtgcccggttcctgctcttgagtctcgggcaaggacaaggtagcccgtctggcagctaagaggcgatggggatagcggagcgggagacggagccggtgtgcacagctgggcacttgctgttgccactgctgctgggaagtcggctcctgccttctctctgggctctgctcctgcctggggggtcctcaggtgctgggtgacagagcttggaaaccaaactggcctggttggggaaagactctgtctgtcttttccaaagtagctcactagtaactagtgctattagtgccattactgattaatagtaaataggaactggcctattggtttcttgagcatctcctccatgccaggccctgtgctaagcttttgacatcccatttcatcctcacagccacctggacggtaagtactgctgctagcctcaccctaaggacgagggaaatcaggcgcagagaagttaagtaacccactcagagtcacactgtgttaaggggtgagctaggtccagctctttctcactctgaagtctgtgcccatgacctccaactggagtctgcccctgcagaagccgttagagaggaaagcctccaactcctgcccctgtgtgggagccatcgtggcacagcccatgtctttgtggccgaaagtgaaatgtccccatctgtagcaccgcccctctgggtctacccacctggccttgtctggttaacttcgcgcctctgctctcaggccctgctatgcccccttctatcatgaaatctgcgtctgcagagacaccaggggatggaacctggggacccctggcccactaaccatgtccccatcccagccttcacggctggagaaaatgcctggggtctgaccctgggcttggcgtgtcttttgtcagatgctcctgagcacctgcagcatagcccctgccccaggccattgcccaaagcccctcctccagcctagaatcctacccgaagggtgtgtcggaactggggttcttctcttcaaggggaaggagctccctctgacccctggccctgctccagctgctgggagcctggtcccctgcttagtctcctggctctgcacctccatcacccacagcctggcacagcgggcccagtggtgggtccgggcagctaggcagctgaggctggggtgggaggctgcccagggccacccagctgcagggtgctgagctggcacgtcttccaccttgtcacctagggcactgccttaccctctgcccttccttccagatcccagtcacccaggcctgcctcatggaggacatcgagcagtggctgtccactgacgtgggtaatgatgcggaagagcctaagggggtcaccagcgaagaatttgacaaattcctggaagaacgggccaaagccgcggaccgattgcccaacctctccagcccctcagctgaggggcccccgggtcccccatctggcccagcgccccggaagaagacccaggagaaagatgatgacatgctgtttgccttatgagtgtggggtctggcaccctgcagcccaggtccccactgctctcacacccttaggctgggacctccctccctcctctggtgttaaggctgctttgggggtggcttgttacccccttttcctcctctttgaagacggagctgccccagctgtggctgggggtgtggaggcagtgggatgaactgggggacaggtctgcgctgcagtgggatctggctgctctgcctcctttcccaccccagctgaccatgagactttgctgagaagtggaggccccaggacaggctggctggctggctggctgcttgacccagtgtgactctccttcactgagtgataccctgctccgggcccatgccccaaggagcccttcagagcccacactgccagtcgaggcctggctggaggctggccacagtggaaattctgccgagcctcttgtcccttccctgctctgctgcatggggccccatggctttggctggccactgagggtagggtgtggaggtgtggaggccccctgaggagctgcggcggcccaggtacgaagctgcaactctgcgcgcagtgggcgagatctcatcagccccaggctgcaggtgaggcttcaggggatgctggggccccactgcccctccgctgccttgccctccatccttcctctgttccttctggccgggcaccacagcactggggctcacctcttggttgatcctcttgtactgggagaggtgccttttgtatccccaattaaaggtagaaaaccaccctgctagcagcattgtcaa

SEQ ID NO: 11096 - protein, 122 aa, Homo sapiens
MMRKSLRGSPAKNLTNSWKNGPKPRTDCPTSPAPQLRGPRVPHLAQRPGRRPRRKMMTCCLPYECGVWHPAAQVPTALTPLGWDLPPSSGVKAALGVACYPLFLLFEDGAAPAVAGGVEAVG

SEQ ID NO: 11097 - DNA, 1901 bp, Homo sapiens
cgggacacgaccttgtgggtgaggtccttggccctcggccctgctcagtgcccatgagctgggtgaatttgattgtcacttaactcacctgggttaagacggagggattttggaagatggcaaagttcatgacacccgtgatccaggacaacccctcaggctggggtccctgtgcggttcccgagcagtttcgggatatgccctaccagccgttcagcaaaggagatcggctaggaaaggttgcagactggacaggagccacataccaagataagaggtacacaaataagtactcctctcagtttggtggtggaagtcaatatgcttatttccatgaggaggatgaaagtagcttccagctggtggatacagcgcgcacacagaagacggcctaccagcggaatcgaatgagatttgcccagaggaacctccgcagagacaaagatcgtcggaacatgttgcagttcaacctgcagatcctgcctaagagtgccaaacagaaagagagagaacgcattcgactgcagaaaaagttccagaaacaatttggggttaggcagaaatgggatcagaaatcacagaaaccccgagactcttcagttgaagttcgtagtgattgggaagtgaaagaggaaatggattttcctcagttgatgaagatgcgctacttggaagtatcagagccacaggacattgagtgttgtggggccctagaatactacgacaaagcctttgaccgcatcaccacgaggagtgagaagccactgcggagcatcaagcgcatcttccacactgtcaccaccacagacgaccctgtcatccgcaagctggcaaaaactcaggggaatgtgtttgccactgatgccatcctggccacgctgatgagctgtacccgctcagtgtattcctgggatattgtcgtccagagagttgggtccaaactcttctttgacaagagagacaactctgactttgacctcctgacagtgagtgagactgccaatgagccccctcaagatgaaggtaattccttcaattcaccccgcaacctggccatggaggcaacctacatcaaccacaatttctcccagcagtgcttgagaatggggaaggaaagatacaacttccccaacccaaacccgtttgtggaggacgacatggataagaatgaaatcgcctctgttgcgtaccgttaccgcaggtggaagcttggagatgatattgaccttattgtccgttgtgagcacgatggcgtcatgactggagccaacggggaagtgtccttcatcaacatcaagacactcaatgagtgggattccaggcactgtaatggcgttgactggcgtcagaagctggactctcagcgaggggctgtcattgccacggagctgaagaacaacagctacaagttggcccggtggacctgctgtgctttgctggctggatctgagtacctcaagcttggttatgtgtctcggtaccacgtgaaagactcctcacgccacgtcatcctaggcacccagcagttcaagcctaatgagtttgccagccagatcaacctgagcgtggagaatgcctggggcattttacgctgcgtcattgacatctgcatgaagctggaggagggcaaatacctcatcctcaaggaccccaacaagcaggtcatccgtgtctacagcctccctgatggcaccttcagctctgatgaagatgaggaggaagaggaggaggaagaagaggaagaagaagaggaagaaacttaaaccagtgatgtggagctggagtttgtccttccaccgagactacgagggcctttgatgcttagtggaatgtgtgtctaacttgctctctgacatttagcagatgaaataaaatatatatctgtttagtctttccctcat

SEQ ID NO: 11098 - protein, 548 aa, Homo sapiens; identical to SEQ ID NO: 1724

SEQ ID NO: 11099 - DNA, 2156 bp, Homo sapiens
gagcttcgattgcgcggccgccaagtttcagtgatgaacgccctctttgggcgtccccggataccgcctgacgtagtgccaatcacacctctcgcgtctcggcgcctcggaggctaatgaggacgcctggcgaaacgcagtaacggatttccgggtggaccttcgctttacggctcgtgagttcttccgcccaacccagaggaagcgggagagcagtttacgacagcgccggtcgtgtttacggcggcgcccgctgcgcgcgcatgtttcctcttttcctggtttctcaagagtgctgctgctaacgcggtccccggcacgcaccatctgttgccatcccggccggccgaggccattgcagattttggaagatggcaaagttcatgacacccgtgatccaggacaacccctcaggctggggtccctgtgcggttcccgagcagtttcgggatatgccctaccagccgttcagcaaaggagatcggctaggaaaggttgcagactggacaggagccacataccaagataagaggtacacaaataagtactcctctcagtttggtggtggaagtcaatatgcttatttccatgaggaggatgaaagtagcttccagctggtggatacagcgcgcacacagaagacggcctaccagcggaatcgaatgagatttgcccagaggaacctccgcagagacaaagatcgtcggaacatgttgcagttcaacctgcagatcctgcctaagagtgccaaacagaaagagagagaacgcattcgactgcagaaaaagttccagaaacaatttggggttaggcagaaatgggatcagaaatcacagaaaccccgagactcttcagttgaagttcgtagtgattgggaagtgaaagaggaaatggattttcctcagttgatgaagatgcgctacttggaagtatcagagccacaggacattgagtgttgtggggccctagaatactacgacaaagcctttgaccgcatcaccacgaggagtgagaagccactgcggagcatcaagcgcatcttccacactgtcaccaccacagacgaccctgtcatccgcaagctggcaaaaactcaggggaatgtgtttgccactgatgccatcctggccacgctgatgagctgtacccgctcagtgtattcctgggatattgtcgtccagagagttgggtccaaactcttctttgacaagagagacaactctgactttgacctcctgacagtgagtgagactgccaatgagccccctcaagatgaaggtaattccttcaattcaccccgcaacctggccatggaggcaacctacatcaaccacaatttctcccagcagtgcttgagaatggggaaggaaagatacaacttccccaacccaaacccgtttgtggaggacgacatggataagaatgaaatcgcctctgttgcgtaccgttaccgcaggtggaagcttggagatgatattgaccttattgtccgttgtgagcacgatggcgtcatgactggagccaacggggaagtgtccttcatcaacatcaagacactcaatgagtgggattccaggcactgtaatggcgttgactggcgtcagaagctggactctcagcgaggggctgtcattgccacggagctgaagaacaacagctacaagttggcccggtggacctgctgtgctttgctggctggatctgagtacctcaagcttggttatgtgtctcggtaccacgtgaaagactcctcacgccacgtcatcctaggcacccagcagttcaagcctaatgagtttgccagccagatcaacctgagcgtggagaatgcctggggcattttacgctgcgtcattgacatctgcatgaagctggaggagggcaaatacctcatcctcaaggaccccaacaagcaggtcatccgtgtctacagcctccctgatggcaccttcagctctgatgaagatgaggaggaagaggaggaggaagaagaggaagaagaagaggaagaaacttaaaccagtgatgtggagctggagtttgtccttccaccgagactacgagggcctttgatgcttagtggaatgtgtgtctaacttgctctctgacatttagcagatgaaataaaatatatatctgtttagtctttccctcat

SEQ ID NO: 11100 - protein, 548 aa, Homo sapiens; identical to SEQ ID NO: 1724

SEQ ID NO: 11101 - DNA, 1014 bp, Homo sapiens
gagcttcgattgcgcggccgccaagtttcagtgatgaacgccctctttgggcgtccccggataccgcctgacgtagtgccaatcacacctctcgcgtctcggcgcctcggaggctaatgaggacgcctggcgaaacgcagtaacggatttccgggtggaccttcgctttacggctcgtgagttcttccgcccaacccagaggaagcgggagagcagtttacgacagcgccggtcgtgtttacggcggcgcccgctgcgcgcgcatgtttcctcttttcctggtttctcaagagtgctgctgctaacgcggtccccggcacgcaccatctgttgccatcccggccggccgaggccattgcagattttggaagatggcaaagttcatgacacccgtgatccaggacaacccctcaggctggggtccctgtgcggttcccgagcagtttcgggatatgccctaccagccgttcagcaaaggagatcggctaggaaaggttgcagactggacaggagccacataccaagataagaggtacacaaataagtactcctctcagtttggtggtggaagtcaatatgcttatttccatgaggaggatgaaagtagcttccagctggtggatacagcgcgcacacagaagacggcctaccagcggaatcgaatgagatttgcccagaggaacctccgcagagacaaagatcgtcggaacatgttgcagttcaacctgcagatcctgcctaagagtgccaaacagaaagagagagaacgcattcgactgcagaaaaagttccagaaacaatttggggttaggcagaaatgggatcagaaatcacagaaaccccgagacttcttctttgacaagagagacaactctgactttgacctcctgacagtgagtgagactgccaatgagccccctcaagatgaaggtaattccttcaattcaccccgcaacctggccatggaggcaacctacatcaaccacaatttctcccagcagtgcttgagaatgg

SEQ ID NO: 11102 - protein, 213 aa, Homo sapiens
MAKFMTPVIQDNPSGWGPCAVPEQFRDMPYQPFSKGDRLGKVADWTGATYQDKRYTNKYSSQFGGGSQYAYFHEEDESSFQLVDTARTQKTAYQRNRMRFAQRNLRRDKDRRNMLQFNLQILPKSAKQKERERIRLQKKFQKQFGVRQKWDQKSQKPRDFFFDKRDNSDFDLLTVSETANEPPQDEGNSFNSPRNLAMEATYINHNFSQQCLR

SEQ ID NO: 11103 - DNA, 930 bp, Homo sapiens
gagcttcgattgcgcggccgccaagtttcagtgatgaacgccctctttgggcgtccccggataccgcctgacgtagtgccaatcacacctctcgcgtctcggcgcctcggaggctaatgaggacgcctggcgaaacgcagtaacggatttccgggtggaccttcgctttacggctcgtgagttcttccgcccaacccagaggaagcgggagagcagtttacgacagcgccggtcgtgtttacggcggcgcccgctgcgcgcgcatgtttcctcttttcctggtttctcaagagtgctgctgctaacgcggtccccggcacgcaccatctgttgccatcccggccggccgaggccattgcagattttggaagatggcaaagttcatgacacccgtgatccaggacaacccctcaggctggggtccctgtgcggttcccgagcagtttcgggatatgccctaccagccgttcagcaaaggagatcggctaggaaaggttgcagactggacaggagccacataccaagataagaggtacacaaataagtactcctctcagtttggtggtggaagtcaatatgcttatttccatgaggaggatgaaagtagcttccagctggtggatacagcgcgcacacagaagacggcctaccagcggaatcgaatgagatttgcccagaggaacctccgcagagacaaagatcgtcggaacatgttgcagttcaacctgcagatcctgcctaagagtgccaaacagaaagagagagaacgcattcgactgcagaaaaagttccagaaacaatttggggttaggcagaaatgggatcagaaatcacaggtaatgtatttataccagaattctgccttggaatttggttctgtttatttggttgtctttattaatagcttagatgagatatacttcacatacc

SEQ ID NO: 11104 - protein, 185 aa, Homo sapiens
MAKFMTPVIQDNPSGWGPCAVPEQFRDMPYQPFSKGDRLGKVADWTGATYQDKRYTNKYSSQFGGGSQYAYFHEEDESSFQLVDTARTQKTAYQRNRMRFAQRNLRRDKDRRNMLQFNLQILPKSAKQKERERIRLQKKFQKQFGVRQKWDQKSQVMYLYQNSALEFGSVYLVVFINSLDEIYFT

SEQ ID NO: 11105 - DNA, 933 bp, Homo sapiens
atgaagtgcatcttggtggccattgagggcacagaggccctcttctactggacggatgaggagtttgaagagagtctccagctgaagttcgggcagtcagagaatgaggaagaagagctccctgccctacaggaccagctcagccccctcctagccccggtcatcatctcctccatgacgatgctggagaagctctcggacacctacacctgcttctccatggaaaacagcaactccctgtatgtccttcacctgtttggagaatgcctgttcattgccatcaatggcgaccacaccaagagcgagggggacctgcagcggaagctgtacatgctcgagctgcggcccccagacctggggcagcgtgtccagctgtgggagcactttcagagcctgctgtggacctatagccgcctgcgggagcaggaacagtgcttcgccatggaggtgattactgggcgcaggagtccgcaggacttggagctgtcagaaatctttgaagacagttccttcaaccctcccctcctcctcccacaaaattatattgaggtggaacaggaggggaaagcagtggagaagaacacagcgctaaagtgccaatcacacctctcgcgtctcggcgcctcggaggctaatgaggacgcctggcgaaacgcagtaacggatttccgggtggaccttcgctttacggctcgtgagttcttccgcccaacccagaggaagcgggagagcagtttacgacagcgccggtcgtgtttacggcggcgcccgctgcgcgcgcatgtttcctcttttcctggtttctcaagagtgctgctgctaacgcggtccccggcacgcaccatctgttgccatcccggccggccgaggccattgcaggtgagcggcgtgtttcataggttcctgcggccctccggagccggttcggactag

SEQ ID NO: 11106 - protein, 310 aa, Homo sapiens
MKCILVAIEGTEALFYWTDEEFEESLQLKFGQSENEEEELPALQDQLSPLLAPVIISSMTMLEKLSDTYTCFSMENSNSLYVLHLFGECLFIAINGDHTKSEGDLQRKLYMLELRPPDLGQRVQLWEHFQSLLWTYSRLREQEQCFAMEVITGRRSPQDLELSEIFEDSSFNPPLLLPQNYIEVEQEGKAVEKNTALKCQSHLSRLGASEANEDAWRNAVTDFRVDLRFTAREFFRPTQRKRESSLRQRRSCLRRRPLRAHVSSFPGFSRVLLLTRSPARTICCHPGRPRPLQVSGVFHRFLRPSGAGSD

SEQ ID NO: 11107 - DNA, 393 bp, Homo sapiens
atgaggaaatgaagaccgacggaagctatctcttgagctcgtcatgcagctggcgaagggtggagcagggcttcaaatgcagacctttccaactccattgtccctgctctcctgcgtgccctttcctgccttttctcaagggagaccatgagatcaagaaaaaagattttcttctccacggcaactgaagtgttgactttgacagtgaaagctacagagtgtatgatgtttccctttttgccttgcttgccaggaagcttgtgctttttgtcaaactgcttacttcccctttccatggttttggtcttctacctttgacagacttttattcataagtcttactgtaagctgttctactcatagaataagctgaataaatagaaattgaattga

SEQ ID NO: 11108 - protein, 59 aa, Homo sapiens
MKTDGSYLLSSSCSWRRVEQGFKCRPFQLHCPCSPACPFLPFLKGDHEIKKKDFLLHGN

SEQ ID NO: 11109 - DNA, 1854 bp, Homo sapiens; identical to SEQ ID NO: 1727

SEQ ID NO: 11110 - protein, 297 aa, Homo sapiens
MQTPRPAMRMEAGEAAPPAGAGGRAAGGWGKWVRLNVGGTVFLTTRQTLCREQKSFLSRLCQGEELQSDRDETGAYLIDRDPTYFGPILNFLRHGKLVLDKDMAEEGVLEEAEFYNIGPLIRIIKDRMEEKDYTVTQVPPKHVYRVLQCQEEELTQMVSTMSDGWRFEQLVNIGSSYNYGSEDQAEFLCVVSKELHSTPNGLSSESSRKTKSTEEQLEEQQQQEEEVEEVEVEQVQVEADAQEKGSRPHPLRPEAELAVRASPRPLARPQSCHPCCYKPEAPGCEAPDHLQGLGVPI

SEQ ID NO: 11111 - DNA, 713 bp, Homo sapiens
ggatgcagacgccgcggccggcgatgaggatggaggccggggaggcagcgccgccggcgggggcgggcggccgcgccgcaggcggctggggcaagtgggtgcggctcaacgtggggggcacggtgttcctgaccacccggcagacgctgtgccgcgagcagaagtccttcctcagccgcctgtgccagggggaagagctgcagtcggaccgggatgagaccggggcctacctcattgaccgtgaccccacctacttcgggcccatcctgaacttcctccggcatggcaagctggtgctggacaaggacatggctgaggagggggtcctggaggaagccgagttctacaacatcggcccgctgatccgcatcatcaaagaccggatggaagagaaggactacacggtcacccaggtcccacccaagcacgtgtaccgcgtgctgcagtgccaggaggaggagctcacgcaaatggtctccaccatgtctgatggctggcgcttcgagcagctggtgaacatcggctcctcctacaactacggcagcgaggaccaggcagagttcctgtgtgtggtgtccaaggagctccacagcaccccaaacgggctgagctcagagtccagccgcaaaaccaaggtgagcccacccgcctcagcctgtgtccggagaagtctcctgtctccctccaccctccccgcctgtcccgcccctgcg

SEQ ID NO: 11112 - protein, 236 aa, Homo sapiens
MQTPRPAMRMEAGEAAPPAGAGGRAAGGWGKWVRLNVGGTVFLTTRQTLCREQKSFLSRLCQGEELQSDRDETGAYLIDRDPTYFGPILNFLRHGKLVLDKDMAEEGVLEEAEFYNIGPLIRIIKDRMEEKDYTVTQVPPKHVYRVLQCQEEELTQMVSTMSDGWRFEQLVNIGSSYNYGSEDQAEFLCVVSKELHSTPNGLSSESSRKTKVSPPASACVRRSLLSPSTLPACPAP

SEQ ID NO: 11113 - DNA, 1847 bp, Homo sapiens
ggatgcagacgccgcggccggcgatgaggatggaggccggggaggcagcgccgccggcgggggcgggcggccgcgccgcaggcggctggggcaagtgggtgcggctcaacgtggggggcacggtgttcctgaccacccggcagacgctgtgccgcgagcagaagtccttcctcagccgcctgtgccagggggaagagctgcagtcggaccgggatgagaccggggcctacctcattgaccgtgaccccacctacttcgggcccatcctgaacttcctccggcatggcaagctggtgctggacaaggacatggctgaggagggggtcctggaggaagccgagttctacaacatcggcccgctgatccgcatcatcaaagaccggatggaagagaaggactacacggtcacccaggtcccacccaagcacgtgtaccgcgtgctgcagtgccaggaggaggagctcacgcaaatggtctccaccatgtctgatggctggcgcttcgagcagctggtgaacatcggctcctcctacaactacggcagcgaggaccaggcagagttcctgtgtgtggtgtccaaggagctccacagcaccccaaacgggctgagctcagagtccagccgcaaaaccaagagcacggaggagcagctggaggagcagcagcagcaggaggaggaggtggaggaggtggaggtggaacaggtgcaggtggaggcagatgcacaggagaaaggtgcagccaacccccaggaggatgattgctaagcaaagccggagcctcccgcccactccttgctggagccagctgcagaaccgggggccccggggctgctgggggggcaccagggttagctcagccacttgcctggcgcctcacccgcataaccatcccttctctcactttctctttgcagcccagtcatctcaggatcccgctaaccttttctccctcccaccactgcctcctcctccgcttcccgctggaggtcctgcctcatcttcatccacctcttcttcctcctggatctcatctgcaccctgcctcttccctctctgcccctgtccgggttttctctctgcctgctcacgcctccatcccgggtctgccctggtcccagcctcccgtgccctccacccaggccccctggccctgcatcccagagcgtcctgcctgccgcctcctgcgccccttctggtacctcctgcctcccagcctggggaggaggggcgcagctgcacctcctctgtgcccactaaccctgccgggcacctctgagactgggccctggctgcaggccctgccccccctcctctcctcccggcctcctcctcacgtttcctccttgcaggttcccgtccgcaccctctcagacctgaggctgagcttgcagtgagggcttctcctcggcccctcgcccgcccccagagctgccatccctggtttgtagcttggcggtgctggagggaggggtggagcgaggagggtgctcatctcttgatccttggacttgagccgagctttcggctgattatctccacccaccaaagtttctcatccgaccttggccctgcatcaccccctccttaccggccccacctccgcccctcccatcctcctgcccttcccctcttttttttctagctgttacaagccagaggcacccggatgtgaggccccagatcacctccagggacttggggttcccatctgaaatcctttatttttgtaccatgggtgggtatggcggctgagccaggggccctcctgtgtttgacttcccgggatgggtccttgcttctcagctgtgtccgaccccaccatgtaataaaacccaaaggaacagc

SEQ ID NO: 11114 - protein, 254 aa, Homo sapiens
MQTPRPAMRMEAGEAAPPAGAGGRAAGGWGKWVRLNVGGTVFLTTRQTLCREQKSFLSRLCQGEELQSDRDETGAYLIDRDPTYFGPILNFLRHGKLVLDKDMAEEGVLEEAEFYNIGPLIRIIKDRMEEKDYTVTQVPPKHVYRVLQCQEEELTQMVSTMSDGWRFEQLVNIGSSYNYGSEDQAEFLCVVSKELHSTPNGLSSESSRKTKSTEEQLEEQQQQEEEVEEVEVEQVQVEADAQEKGAANPQEDDC

SEQ ID NO: 11115 - DNA, 1764 bp, Homo sapiens
ggatgcagacgccgcggccggcgatgaggatggaggccggggaggcagcgccgccggcgggggcgggcggccgcgccgcaggcggctggggcaagtgggtgcggctcaacgtggggggcacggtgttcctgaccacccggcagacgctgtgccgcgagcagaagtccttcctcagccgcctgtgccagggggaagagctgcagtcggaccgggatgagaccggggcctacctcattgaccgtgaccccacctacttcgggcccatcctgaacttcctccggcatggcaagctggtgctggacaaggacatggctgaggagggggtcctggaggaagccgagttctacaacatcggcccgctgatccgcatcatcaaagaccggatggaagagaaggactacacggtcacccaggtcccacccaagcacgtgtaccgcgtgctgcagtgccaggaggaggagctcacgcaaatggtctccaccatgtctgatggctggcgcttcgagcagctggtgaacatcggctcctcctacaactacggcagcgaggaccaggcagagttcctgtgtgtggtgtccaaggagctccacagcaccccaaacgggctgagctcagagtccagccgcaaaaccaagagcacggaggagcagctggaggagcagcagcagcaggaggaggaggtggaggaggtggaggtggaacaggtgcaggtggaggcagatgcacaggagaaagcccagtcatctcaggatcccgctaaccttttctccctcccaccactgcctcctcctccgcttcccgctggaggttcccgtccgcaccctctcagacctgaggctgagcttgcagtgagggcttctcctcggcccctcgcccgcccccagagctgccatccctgctgttacaagccagaggcacccggatgtgaggccccagatcacctccagggacttggggttcccatctgaaatcctttatttttgtaccatggggtgggccccgggcctgagaaggaagaagcaccctctccccggcctcctctgtctgcacccgtggggctgtgacttactcctgcctccaggggcggggcggggcccccctgggacctcttaaggcccaaggtgggccccaggacctctgggcagagtggactgctcatggcagatgtgtggcaatgtctggctgtgtctctccggcacctgcgtcccctctcccgggctcccctgctgcatggtggatgtgctccttcctggcccggtcacattgcctccttgagccttagtccagggggtcactcctcccaccccacctacctcacagggttgttgtgagggtgcacagaggagcaaagtccctgaaggccctcaggcagtatataggggccgcccaccttcagctgccctgggatgggaaggacccagcccgacccctgggcataacactgtgtttgcaaatggagattcaggtattggggatgcaggttgtggggagctggcctggcagagtaggggtagttggcttggccttctctttggtgatcccacccccagccatttgcattgctggcccagcgcctggcctggggggcggggagaggcagcagaaggggctgggcaggggcggtggaggactcaggaactgcccggggagagtgggtatggcggctgagccaggggccctcctgtgtttgacttcccgggatgggtccttgcttctcagctgtgtccgaccccaccatgtaataaaacccaaaggaacagccca

SEQ ID NO: 11116 - protein, 321 aa, Homo sapiens
MQTPRPAMRMEAGEAAPPAGAGGRAAGGWGKWVRLNVGGTVFLTTRQTLCREQKSFLSRLCQGEELQSDRDETGAYLIDRDPTYFGPILNFLRHGKLVLDKDMAEEGVLEEAEFYNIGPLIRIIKDRMEEKDYTVTQVPPKHVYRVLQCQEEELTQMVSTMSDGWRFEQLVNIGSSYNYGSEDQAEFLCVVSKELHSTPNGLSSESSRKTKSTEEQLEEQQQQEEEVEEVEVEQVQVEADAQEKAQSSQDPANLFSLPPLPPPPLPAGGSRPHPLRPEAELAVRASPRPLARPQSCHPCCYKPEAPGCEAPDHLQGLGVPI

SEQ ID NO: 11117 - DNA, 1501 bp, Homo sapiens
ggatgcagacgccgcggccggcgatgaggatggaggccggggaggcagcgccgccggcgggggcgggcggccgcgccgcaggcggctggggcaagtgggtgcggctcaacgtggggggcacggtgttcctgaccacccggcagacgctgtgccgcgagcagaagtccttcctcagccgcctgtgccagggggaagagctgcagtcggaccgggatgagaccggggcctacctcattgaccgtgaccccacctacttcgggcccatcctgaacttcctccggcatggcaagctggtgctggacaaggacatggctgaggagggggtcctggaggaagccgagttctacaacatcggcccgctgatccgcatcatcaaagaccggatggaagagaaggactacacggtcacccaggtcccacccaagcacgtgtaccgcgtgctgcagtgccaggaggaggagctcacgcaaatggtctccaccatgtctgatggctggcgcttcgagcagctggtgaacatcggctcctcctacaactacggcagcgaggaccaggcagagttcctgtgtgtggtgtccaaggagctccacagcaccccaaacgggctgagctcagagtccagccgcaaaaccaagctgttacaagccagaggcacccggatgtgaggccccagatcacctccagggacttggggttcccatctgaaatcctttatttttgtaccatggggtgggccccgggcctgagaaggaagaagcaccctctccccggcctcctctgtctgcacccgtggggctgtgacttactcctgcctccaggggcggggcggggcccccctgggacctcttaaggcccaaggtgggccccaggacctctgggcagagtggactgctcatggcagatgtgtggcaatgtctggctgtgtctctccggcacctgcgtcccctctcccgggctcccctgctgcatggtggatgtgctccttcctggcccggtcacattgcctccttgagccttagtccagggggtcactcctcccaccccacctacctcacagggttgttgtgagggtgcacagaggagcaaagtccctgaaggccctcaggcagtatataggggccgcccaccttcagctgccctgggatgggaaggacccagcccgacccctgggcataacactgtgtttgcaaatggagattcaggtattggggatgcaggttgtggggagctggcctggcagagtaggggtagttggcttggccttctctttggtgatcccacccccagccatttgcattgctggcccagcgcctggcctggggggcggggagaggcagcagaaggggctgggcaggggcggtggaggactcaggaactgcccggggagagtgggtatggcggctgagccaggggccctcctgtgtttgacttcccgggatgggtccttgcttctcagctgtgtccgaccccaccatgtaataaaacccaaaggaacagccca

SEQ ID NO: 11118 - protein, 220 aa, Homo sapiens
MQTPRPAMRMEAGEAAPPAGAGGRAAGGWGKWVRLNVGGTVFLTTRQTLCREQKSFLSRLCQGEELQSDRDETGAYLIDRDPTYFGPILNFLRHGKLVLDKDMAEEGVLEEAEFYNIGPLIRIIKDRMEEKDYTVTQVPPKHVYRVLQCQEEELTQMVSTMSDGWRFEQLVNIGSSYNYGSEDQAEFLCVVSKELHSTPNGLSSESSRKTKLLQARGTRM

SEQ ID NO: 11119 - DNA, 1592 bp, Homo sapiens
ggatgcagacgccgcggccggcgatgaggatggaggccggggaggcagcgccgccggcgggggcgggcggccgcgccgcaggcggctggggcaagtgggtgcggctcaacgtggggggcacggtgttcctgaccacccggcagacgctgtgccgcgagcagaagtccttcctcagccgcctgtgccagggggaagagctgcagtcggaccgggatgagaccggggcctacctcattgaccgtgaccccacctacttcgggcccatcctgaacttcctccggcatggcaagctggtgctggacaaggacatggctgaggagggggtcctggaggaagccgagttctacaacatcggcccgctgatccgcatcatcaaagaccggatggaagagaaggactacacggtcacccaggtcccacccaagcacgtgtaccgcgtgctgcagtgccaggaggaggagctcacgcaaatggtctccaccatgtctgatggctggcgcttcgagcagctggtgaacatcggctcctcctacaactacggcagcgaggaccaggcagagttcctgtgtgtggtgtccaaggagctccacagcaccccaaacgggctgagctcagagtccagccgcaaaaccaaggttcccgtccgcaccctctcagacctgaggctgagcttgcagtgagggcttctcctcggcccctcgcccgcccccagagctgccatccctgctgttacaagccagaggcacccggatgtgaggccccagatcacctccagggacttggggttcccatctgaaatcctttatttttgtaccatggggtgggccccgggcctgagaaggaagaagcaccctctccccggcctcctctgtctgcacccgtggggctgtgacttactcctgcctccaggggcggggcggggcccccctgggacctcttaaggcccaaggtgggccccaggacctctgggcagagtggactgctcatggcagatgtgtggcaatgtctggctgtgtctctccggcacctgcgtcccctctcccgggctcccctgctgcatggtggatgtgctccttcctggcccggtcacattgcctccttgagccttagtccagggggtcactcctcccaccccacctacctcacagggttgttgtgagggtgcacagaggagcaaagtccctgaaggccctcaggcagtatataggggccgcccaccttcagctgccctgggatgggaaggacccagcccgacccctgggcataacactgtgtttgcaaatggagattcaggtattggggatgcaggttgtggggagctggcctggcagagtaggggtagttggcttggccttctctttggtgatcccacccccagccatttgcattgctggcccagcgcctggcctggggggcggggagaggcagcagaaggggctgggcaggggcggtggaggactcaggaactgcccggggagagtgggtatggcggctgagccaggggccctcctgtgtttgacttcccgggatgggtccttgcttctcagctgtgtccgaccccaccatgtaataaaacccaaaggaacagccca

SEQ ID NO: 11120 - protein, 225 aa, Homo sapiens
MQTPRPAMRMEAGEAAPPAGAGGRAAGGWGKWVRLNVGGTVFLTTRQTLCREQKSFLSRLCQGEELQSDRDETGAYLIDRDPTYFGPILNFLRHGKLVLDKDMAEEGVLEEAEFYNIGPLIRIIKDRMEEKDYTVTQVPPKHVYRVLQCQEEELTQMVSTMSDGWRFEQLVNIGSSYNYGSEDQAEFLCVVSKELHSTPNGLSSESSRKTKVPVRTLSDLRLSLQ

SEQ ID NO: 11121 - DNA, 520 bp, Homo sapiens
cagggatggcagctctgggggcgggcgaggggccgaggagaagccctcactgcaagctcagcctcaggtctgagagggtgcggacgggaacctgcaaggaggaaacgtgaggaggaggccgggaggagaggagggggggcagggcctgcagccagggcccagtctcagaggtgcccggcagggttagtgggcacagaggaggtgcagctgcgcccctcctccccaggctgggaggcaggaggtaccagaaggggcgcaggaggcggcaggcaggacgctctgggatgcagggccagggggcctgggtggagggcacgggaggctgggaccagggcagacccgggatggaggcgtgagcaggcagagagaaaacccggacaggggtgcagctcttccccctggcacaggcggctgaggaaggacttctgctcgcggcacagcgtctgccgggtggtcaggaacaccgtgccccccacgttgagccgcacccacttgccccagccgcctgcggcgcggccgc

SEQ ID NO: 11122 - protein, 34 aa, Homo sapiens
MAALGAGEGPRRSPHCKLSLRSERVRTGTCKEET

SEQ ID NO: 11123 - DNA, 901 bp, Homo sapiens
gcgccgcaggcggctggggcaagtgggtgcggctcaacgtggggggcacggtgttcctgaccacccggcagacgctgtgccgcgagcagaagtccttcctcagccgcctgtgccagggggaagagctgcagtcggaccgggcctgagaaggaagaagcaccctctccccggcctcctctgtctgcacccgtggggctgtgacttactcctgcctccaggggcggggcggggcccccctgggacctcttaaggcccaaggtgggccccaggacctctgggcagagtggactgctcatggcagatgtgtggcaatgtctggctgtgtctctccggcacctgcgtcccctctcccgggctcccctgctgcatggtggatgtgctccttcctggcccggtcacattgcctccttgagccttagtccagggggtcactcctcccaccccacctacctcacagggttgttgtgagggtgcacagaggagcaaagtccctgaaggccctcaggcagtatataggggccgcccaccttcagctgccctgggatgggaaggacccagcccgacccctgggcataacactgtgtttgcaaatggagattcaggtattggggatgcaggttgtggggagctggcctggcagagtaggggtagttggcttggccttctctttggtgatcccacccccagccatttgcattgctggcccagcgcctggcctggggggcggggagaggcagcagaaggggctgggcaggggcggtggaggactcaggaactgcccggggagagtgggtatggcggctgagccaggggccctcctgtgtttgacttcccgggatgggtccttgcttctcagctgtgtccgaccccaccatgtaataaaacccaaaggaacagccca

SEQ ID NO: 11124 - protein, 102 aa, Homo sapiens
MEIQVLGMQVVGSWPGRVGVVGLAFSLVIPPPAICIAGPAPGLGGGERQQKGLGRGGGGLRNCPGRVGMAAEPGALLCLTSRDGSLLLSCVRPHHVIKPKGT

SEQ ID NO: 11125 - DNA, 764 bp, Homo sapiens
actcttctctcaccgagcatccctcacctccataggatgagaccggggcctacctcattgaccgtgaccccacctacttcgggcccatcctgaacttcctccggcatggcaagctggtgctggacaaggacatggctgaggagggggtcctggaggaagccgagttctacaacatcggcccgctgatccgcatcatcaaagaccggatggaagagaaggactacacggtcacccaggtcccacccaagcacgtgtaccgcgtgctgcagtgccaggaggaggagctcacgcaaatggtctccaccatgtctgatggctggcgcttcgagcagctggtgaacatcggctcctcctacaactacggcagcgaggaccaggcagagttcctgtgtgtggtgtccaaggagctccacagcaccccaaacgggctgagctcagagtccagccgcaaaaccaagagcacggaggagcagctggaggagcagcagcagcaggaggaggaggtggaggaggtggaggtggaacaggtgcaggtggaggcagatgcacaggagaaaggtgcagccaacccccaggaggatgattgctaagcaaagccggagcctcccgcccactccttgctggagccagctgcagaaccgggggccccggggctgctgggggggcaccagggttagctcagccacttgcctggcgcctcacccgcataaccatcccttctctcactttctctttgcagcccagtcatctcaggatcccgctaa

SEQ ID NO: 11126 - protein, 152 aa, Homo sapiens
MAEEGVLEEAEFYNIGPLIRIIKDRMEEKDYTVTQVPPKHVYRVLQCQEEELTQMVSTMSDGWRFEQLVNIGSSYNYGSEDQAEFLCVVSKELHSTPNGLSSESSRKTKSTEEQLEEQQQQEEEVEEVEVEQVQVEADAQEKGAANPQEDDC

SEQ ID NO: 11127 - DNA, 1164 bp, Homo sapiens
cctgcctcatcttcatccacctcttcttcctcctggatctcatctgcaccctgcctcttccctctctgcccctgtccgggttttctctctgcctgctcacgcctccatcccgggtctgccctggtcccagcctcccgtgccctccacccaggccccctggccctgcatcccagagcgtcctgcctgccgcctcctgcgccccttctggttcccgtccgcaccctctcagacctgaggctgagcttgcagtgagggcttctcctcggcccctcgcccgcccccagagctgccatccctgctgttacaagccagaggcacccggatgtgaggccccagatcacctccagggacttggggttcccatctgaaatcctttatttttgtaccatggggtgggccccgggcctgagaaggaagaagcaccctctccccggcctcctctgtctgcacccgtggggctgtgacttactcctgcctccaggggcggggcggggcccccctgggacctcttaaggcccaaggtgggccccaggacctctgggcagagtggactgctcatggcagatgtgtggcaatgtctggctgtgtctctccggcacctgcgtcccctctcccgggctcccctgctgcatggtggatgtgctccttcctggcccggtcacattgcctccttgagccttagtccagggggtcactcctcccaccccacctacctcacagggttgttgtgagggtgcacagaggagcaaagtccctgaaggccctcaggcagtatataggggccgcccaccttcagctgccctgggatgggaaggacccagcccgacccctgggcataacactgtgtttgcaaatggagattcaggtattggggatgcaggttgtggggagctggcctggcagagtaggggtagttggcttggccttctctttggtgatcccacccccagccatttgcattgctggcccagcgcctggcctggggggcggggagaggcagcagaaggggctgggcaggggcggtggaggactcaggaactgcccggggagagtgggtatggcggctgagccaggggccctcctgtgtttgacttcccgggatgggtccttgcttctcagctgtgtccgaccccaccatgtaataaaacccaaaggaacagccca

SEQ ID NO: 11128 - protein, 102 aa, Homo sapiens; identical to SEQ ID NO: 11124

SEQ ID NO: 11129 - DNA, 178 bp, Homo sapiens
agcaccctctccccggcctcctctgtctgcacccgtggggctgtgacttactcctgcccggggagagtgggtatggcggctgagccaggggccctcctgtgtttgacttcccgggatgggtccttgcttctcagctgtgtccgaccccaccatgtaataaaacccaaaggaacagccc

SEQ ID NO: 11130 - protein, 34 aa, Homo sapiens
MAAEPGALLCLTSRDGSLLLSCVRPHHVIKPKGT

SEQ ID NO: 11131 - DNA, 3195 bp, Homo sapiens
tcttgagccagacccagtccagctctggtgcctgccctctggtgcgagctgacctgagatgcacttccctcctctgtgagctgtctcggcacccacttgcagtcactgccgcctgatgttgttactcttccactccaaaaggatgcccgtggccgaggccccccaggtggctggcgggcagggggacggaggtgatggcgaggaagcggagccggaggggatgttcaaggcctgtgaggactccaagagaaaagcccggggctacctccgcctggtgcccctgtttgtgctgctggccctgctcgtgctggcttcggcgggggtgctactctggtatttcctagggtacaaggcggaggtgatggtcagccaggtgtactcaggcagtctgcgtgtactcaatcgccacttctcccaggatcttacccgccgggaatctagtgccttccgcagtgaaaccgccaaagcccagaagatgctcaaggagctcatcaccagcacccgcctgggaacttactacaactccagctccgtctattcctttggggagggacccctcacctgcttcttctggttcattctccaaatccccgagcaccgccggctgatgctgagccccgaggtggtgcaggcactgctggtggaggagctgctgtccacagtcaacagctcggctgccgtcccctacagggccgagtacgaagtggaccccgagggcctagtgatcctggaagccagtgtgaaagacatagctgcattgaattccacgctgggttgttaccgctacagctacgtgggccagggccaggtcctccggctgaaggggcctgaccacctggcctccagctgcctgtggcacctgcagggccccaaggacctcatgctcaaactccggctggagtggacgctggcagagtgccgggaccgactggccatgtatgacgtggccgggcccctggagaagaggctcatcacctcggtgtacggctgcagccgccaggagcccgtggtggaggttctggcgtcgggggccatcatggcggtcgtctggaagaagggcctgcacagctactacgaccccttcgtgctctccgtgcagccggtggtcttccaggcctgtgaagtgaacctgacgctggacaacaggctcgactcccagggcgtcctcagcaccccgtacttccccagctactactcgccccaaacccactgctcctggcacctcacggtgccctctctggactacggcttggccctctggtttgatgcctatgcactgaggaggcagaagtatgatttgccgtgcacccagggccagtggacgatccagaacaggaggctgtgtggcttgcgcatcctgcagccctacgccgagaggatccccgtggtggccacggccgggatcaccatcaacttcacctcccagatctccctcaccgggcccggtgtgcgggtgcactatggcttgtacaaccagtcggacccctgccctggagagttcctctgttctgtgaatggactctgtgtccctgcctgtgatggggtcaaggactgccccaacggcctggatgagagaaactgcgtttgcagagccacattccagtgcaaagaggacagcacatgcatctcactgcccaaggtctgtgatgggcagcctgattgtctcaacggcagcgacgaagagcagtgccaggaaggggtgccatgtgggacattcaccttccagtgtgaggaccggagctgcgtgaagaagcccaacccgcagtgtgatgggcggcccgactgcagggacggctcggatgaggagcactgtgactgtggcctccagggcccctccagccgcattgttggtggagctgtgtcctccgagggtgagtggccatggcaggccagcctccaggttcggggtcgacacatctgtgggggggccctcatcgctgaccgctgggtgataacagctgcccactgcttccaggaggacagcatggcctccacggtgctgtggaccgtgttcctgggcaaggtgtggcagaactcgcgctggcctggagaggtgtccttcaaggtgagccgcctgctcctgcacccgtaccacgaagaggacagccatgactacgacgtggcgctgctgcagctcgaccacccggtggtgcgctcggccgccgtgcgccccgtctgcctgcccgcgcgctcccacttcttcgagcccggcctgcactgctggattacgggctggggcgccttgcgcgagggcggccccatcagcaacgctctgcagaaagtggatgtgcagttgatcccacaggacctgtgcagcgaggtctatcgctaccaggtgacgccacgcatgctgtgtgccggctaccgcaagggcaagaaggatgcctgtcagggtgactcaggtggtccgctggtgtgcaaggcactcagtggccgctggttcctggcggggctggtcagctggggcctgggctgtggccggcctaactacttcggcgtctacacccgcatcacaggtgtgatcagctggatccagcaagtggtgacctgaggaactgcccccctgcaaagcagggcccacctcctggactcagagagcccagggcaactgccaagcagggggacaagtattctggcggggggtgggggagagagcaggccctgtggtggcaggaggtggcatcttgtctcgtccctgatgtctgctccagtgatggcaggaggatggagaagtgccagcagctgggggtcaagacgtcccctgaggacccaggcccacacccagcccttctgcctcccaattctctctcctccgtccccttcctccactgctgcctaatgcaaggcagtggctcagcagcaagaatgctggttctacatcccgaggagtgtctgaggtgcgccccactctgtacagaggctgtttgggcagccttgcctccagagagcagattccagcttcggaagcccctggtctaacttgggatctgggaatggaaggtgctcccatcggaggggaccctcagagccctggagactgccaggtgggcctgctgccactgtaagccaaaaggtggggaagtcctgactccagggtccttgccccacccctgcctgccacctgggccctcacagcccagaccctcactgggaggtgagctcagctgccctttggaataaagctgcctgatccaa

SEQ ID NO: 11132 - protein, 811 aa, Homo sapiens; identical to SEQ ID NO: 1730

SEQ ID NO: 11133 - DNA, 3123 bp, Homo sapiens
gagccacctaccctgctccgaggccaggcctgcagggcctcatcggccagagggtgatcagtgagcagaaggatgcccgtggccgaggccccccaggtggctggcgggcagggggacggaggtgatggcgaggaagcggagccggaggggatgttcaaggcctgtgaggactccaagagaaaagcccggggctacctccgcctggtgcccctgtttgtgctgctggccctgctcgtgctggcttcggcgggggtgctactctggtatttcctagggtacaaggcggaggtgatggtcagccaggtgtactcaggcagtctgcgtgtactcaatcgccacttctcccaggatcttacccgccgggaatctagtgccttccgcagtgaaaccgccaaagcccagaagatgctcaaggagctcatcaccagcacccgcctgggaacttactacaactccagctccgtctattcctttggggagggacccctcacctgcttcttctggttcattctccaaatccccgagcaccgccggctgatgctgagccccgaggtggtgcaggcactgctggtggaggagctgctgtccacagtcaacagctcggctgccgtcccctacagggccgagtacgaagtggaccccgagggcctagtgatcctggaagccagtgtgaaagacatagctgcattgaattccacgctgggttgttaccgctacagctacgtgggccagggccaggtcctccggctgaaggggcctgaccacctggcctccagctgcctgtggcacctgcagggccccaaggacctcatgctcaaactccggctggagtggacgctggcagagtgccgggaccgactggccatgtatgacgtggccgggcccctggagaagaggctcatcacctcggtgtacggctgcagccgccaggagcccgtggtggaggttctggcgtcgggggccatcatggcggtcgtctggaagaagggcctgcacagctactacgaccccttcgtgctctccgtgcagccggtggtcttccaggcctgtgaagtgaacctgacgctggacaacaggctcgactcccagggcgtcctcagcaccccgtacttccccagctactactcgccccaaacccactgctcctggcacctcacggtgccctctctggactacggcttggccctctggtttgatgcctatgcactgaggaggcagaagtatgatttgccgtgcacccagggccagtggacgatccagaacaggaggctgtgtggcttgcgcatcctgcagccctacgccgagaggatccccgtggtggccacggccgggatcaccatcaacttcacctcccagatctccctcaccgggcccggtgtgcgggtgcactatggcttgtacaaccagtcggacccctgccctggagagttcctctgttctgtgaatggactctgtgtccctgcctgtgatggggtcaaggactgccccaacggcctggatgagagaaactgcgtttgcagagccacattccagtgcaaagaggacagcacatgcatctcactgcccaaggtctgtgatgggcagcctgattgtctcaacggcagcgacgaagagcagtgccaggaaggggtgccatgtgggacattcaccttccagtgtgaggaccggagctgcgtgaagaagcccaacccgcagtgtgatgggcggcccgactgcagggacggctcggatgaggagcactgtgactgtggcctccagggcccctccagccgcattgttggtggagctgtgtcctccgagggtgagtggccatggcaggccagcctccaggttcggggtcgacacatctgtgggggggccctcatcgctgaccgctgggtgataacagctgcccactgcttccaggaggacagcatggcctccacggtgctgtggaccgtgttcctgggcaaggtgtggcagaactcgcgctggcctggagaggtgtccttcaaggtgagccgcctgctcctgcacccgtaccacgaagaggacagccatgactacgacgtggcgctgctgcagctcgaccacccggtggtgcgctcggccgccgtgcgccccgtctgcctgcccgcgcgctcccacttcttcgagcccggcctgcactgctggattacgggctggggcgccttgcgcgagggcggccccatcagcaacgctctgcagaaagtggatgtgcagttgatcccacaggacctgtgcagcgaggtctatcgctaccaggtgacgccacgcatgctgtgtgccggctaccgcaagggcaagaaggatgcctgtcagggtgactcaggtggtccgctggtgtgcaaggcactcagtggccgctggttcctggcggggctggtcagctggggcctgggctgtggccggcctaactacttcggcgtctacacccgcatcacaggtgtgatcagctggatccagcaagtggtgacctgaggaactgcccccctgcaaagcagggcccacctcctggactcagagagcccagggcaactgccaagcagggggacaagtattctggcggggggtgggggagagagcaggccctgtggtggcaggaggtggcatcttgtctcgtccctgatgtctgctccagtgatggcaggaggatggagaagtgccagcagctgggggtcaagacgtcccctgaggacccaggcccacacccagcccttctgcctcccaattctctctcctccgtccccttcctccactgctgcctaatgcaaggcagtggctcagcagcaagaatgctggttctacatcccgaggagtgtctgaggtgcgccccactctgtacagaggctgtttgggcagccttgcctccagagagcagattccagcttcggaagcccctggtctaacttgggatctgggaatggaaggtgctcccatcggaggggaccctcagagccctggagactgccaggtgggcctgctgccactgtaagccaaaaggtggggaagtcctgactccagggtccttgccccacccctgcctgccacctgggccctcacagcccagaccctcactgggaggtgagctcagctgccctttggaataaagctgcctgatcc

SEQ ID NO: 11134 - protein, 802 aa, Homo sapiens
MPVAEAPQVAGGQGDGGDGEEAEPEGMFKACEDSKRKARGYLRLVPLFVLLALLVLASAGVLLWYFLGYKAEVMVSQVYSGSLRVLNRHFSQDLTRRESSAFRSETAKAQKMLKELITSTRLGTYYNSSSVYSFGEGPLTCFFWFILQIPEHRRLMLSPEVVQALLVEELLSTVNSSAAVPYRAEYEVDPEGLVILEASVKDIAALNSTLGCYRYSYVGQGQVLRLKGPDHLASSCLWHLQGPKDLMLKLRLEWTLAECRDRLAMYDVAGPLEKRLITSVYGCSRQEPVVEVLASGAIMAVVWKKGLHSYYDPFVLSVQPVVFQACEVNLTLDNRLDSQGVLSTPYFPSYYSPQTHCSWHLTVPSLDYGLALWFDAYALRRQKYDLPCTQGQWTIQNRRLCGLRILQPYAERIPVVATAGITINFTSQISLTGPGVRVHYGLYNQSDPCPGEFLCSVNGLCVPACDGVKDCPNGLDERNCVCRATFQCKEDSTCISLPKVCDGQPDCLNGSDEEQCQEGVPCGTFTFQCEDRSCVKKPNPQCDGRPDCRDGSDEEHCDCGLQGPSSRIVGGAVSSEGEWPWQASLQVRGRHICGGALIADRWVITAAHCFQEDSMASTVLWTVFLGKVWQNSRWPGEVSFKVSRLLLHPYHEEDSHDYDVALLQLDHPVVRSAAVRPVCLPARSHFFEPGLHCWITGWGALREGGPISNALQKVDVQLIPQDLCSEVYRYQVTPRMLCAGYRKGKKDACQGDSGGPLVCKALSGRWFLAGLVSWGLGCGRPNYFGVYTRITGVISWIQQVVT

SEQ ID NO: 11135 - DNA, 3179 bp, Homo sapiens
ggacaaacagaggctcctgaggcctgtgtgcaggcccggcacctatctgccgctcccaaaggatgcccgtggccgaggccccccaggtggctggcgggcagggggacggaggtgatggcgaggaagcggagccggaggggatgttcaaggcctgtgaggactccaagagaaaagcccggggctacctccgcctggtgcccctgtttgtgctgctggccctgctcgtgctggcttcggcgggggtgctactctggtatttcctagggtacaaggcggaggtgatggtcagccaggtgtactcaggcagtctgcgtgtactcaatcgccacttctcccaggatcttacccgccgggaatctagtgccttccgcagtgaaaccgccaaagcccagaagatgctcaaggagctcatcaccagcacccgcctgggaacttactacaactccagctccgtctattcctttggggagggacccctcacctgcttcttctggttcattctccaaatccccgagcaccgccggctgatgctgagccccgaggtggtgcaggcactgctggtggaggagctgctgtccacagtcaacagctcggctgccgtcccctacagggccgagtacgaagtggaccccgagggcctagtgatcctggaagccagtgtgaaagacatagctgcattgaattccacgctgggttgttaccgctacagctacgtgggccagggccaggtcctccggctgaaggggcctgaccacctggcctccagctgcctgtggcacctgcagggccccaaggacctcatgctcaaactccggctggagtggacgctggcagagtgccgggaccgactggccatgtatgacgtggccgggcccctggagaagaggctcatcacctcggtgtacggctgcagccgccaggagcccgtggtggaggttctggcgtcgggggccatcatggcggtcgtctggaagaagggcctgcacagctactacgaccccttcgtgctctccgtgcagccggtggtcttccaggcctgtgaagtgaacctgacgctggacaacaggctcgactcccagggcgtcctcagcaccccgtacttccccagctactactcgccccaaacccactgctcctggcacctcacggtgccctctctggactacggcttggccctctggtttgatgcctatgcactgaggaggcagaagtatgatttgccgtgcacccagggccagtggacgatccagaacaggaggctgtgtggcttgcgcatcctgcagccctacgccgagaggatccccgtggtggccacggccgggatcaccatcaacttcacctcccagatctccctcaccgggcccggtgtgcgggtgcactatggcttgtacaaccagtcggacccctgccctggagagttcctctgttctgtgaatggactctgtgtccctgcctgtgatggggtcaaggactgccccaacggcctggatgagagaaactgcgtttgcagagccacattccagtgcaaagaggacagcacatgcatctcactgcccaaggtctgtgatgggcagcctgattgtctcaacggcagcgacgaagagcagtgccaggaaggggtgccatgtgggacattcaccttccagtgtgaggaccggagctgcgtgaagaagcccaacccgcagtgtgatgggcggcccgactgcagggacggctcggatgaggagcactgtgactgtggcctccagggcccctccagccgcattgttggtggagctgtgtcctccgagggtgagtggccatggcaggccagcctccaggttcggggtcgacacatctgtgggggggccctcatcgctgaccgctgggtgataacagctgcccactgcttccaggaggacagcatggcctccacggtgctgtggaccgtgttcctgggcaaggtgtggcagaactcgcgctggcctggagaggtgtccttcaaggtgagccgcctgctcctgcacccgtaccacgaagaggacagccatgactacgacgtggcgctgctgcagctcgaccacccggtggtgcgctcggccgccgtgcgccccgtctgcctgcccgcgcgctcccacttcttcgagcccggcctgcactgctggattacgggctggggcgccttgcgcgagggcgccctacgggcggatgctgtggccctattttatggatggagaaaccaaggctcagagacatgttgctgccccatcagcaacgctctgcagaaagtggatgtgcagttgatcccacaggacctgtgcagcgaggtctatcgctaccaggtgacgccacgcatgctgtgtgccggctaccgcaagggcaagaaggatgcctgtcagggtgactcaggtggtccgctggtgtgcaaggcactcagtggccgctggttcctggcggggctggtcagctggggcctgggctgtggccggcctaactacttcggcgtctacacccgcatcacaggtgtgatcagctggatccagcaagtggtgacctgaggaactgcccccctgcaaagcagggcccacctcctggactcagagagcccagggcaactgccaagcagggggacaagtattctggcggggggtgggggagagagcaggccctgtggtggcaggaggtggcatcttgtctcgtccctgatgtctgctccagtgatggcaggaggatggagaagtgccagcagctgggggtcaagacgtcccctgaggacccaggcccacacccagcccttctgcctcccaattctctctcctccgtccccttcctccactgctgcctaatgcaaggcagtggctcagcagcaagaatgctggttctacatcccgaggagtgtctgaggtgcgccccactctgtacagaggctgtttgggcagccttgcctccagagagcagattccagcttcggaagcccctggtctaacttgggatctgggaatggaaggtgctcccatcggaggggaccctcagagccctggagactgccaggtgggcctgctgccactgtaagccaaaaggtggggaagtcctgactccagggtccttgccccacccctgcctgccacctgggccctcacagcccagaccctcactgggaggtgagctcagctgccctttggaataaagctgcctgatcc

SEQ ID NO: 11136 - protein, 824 aa, Homo sapiens
MPVAEAPQVAGGQGDGGDGEEAEPEGMFKACEDSKRKARGYLRLVPLFVLLALLVLASAGVLLWYFLGYKAEVMVSQVYSGSLRVLNRHFSQDLTRRESSAFRSETAKAQKMLKELITSTRLGTYYNSSSVYSFGEGPLTCFFWFILQIPEHRRLMLSPEVVQALLVEELLSTVNSSAAVPYRAEYEVDPEGLVILEASVKDIAALNSTLGCYRYSYVGQGQVLRLKGPDHLASSCLWHLQGPKDLMLKLRLEWTLAECRDRLAMYDVAGPLEKRLITSVYGCSRQEPVVEVLASGAIMAVVWKKGLHSYYDPFVLSVQPVVFQACEVNLTLDNRLDSQGVLSTPYFPSYYSPQTHCSWHLTVPSLDYGLALWFDAYALRRQKYDLPCTQGQWTIQNRRLCGLRILQPYAERIPVVATAGITINFTSQISLTGPGVRVHYGLYNQSDPCPGEFLCSVNGLCVPACDGVKDCPNGLDERNCVCRATFQCKEDSTCISLPKVCDGQPDCLNGSDEEQCQEGVPCGTFTFQCEDRSCVKKPNPQCDGRPDCRDGSDEEHCDCGLQGPSSRIVGGAVSSEGEWPWQASLQVRGRHICGGALIADRWVITAAHCFQEDSMASTVLWTVFLGKVWQNSRWPGEVSFKVSRLLLHPYHEEDSHDYDVALLQLDHPVVRSAAVRPVCLPARSHFFEPGLHCWITGWGALREGALRADAVALFYGWRNQGSETCCCPISNALQKVDVQLIPQDLCSEVYRYQVTPRMLCAGYRKGKKDACQGDSGGPLVCKALSGRWFLAGLVSWGLGCGRPNYFGVYTRITGVISWIQQVVT

SEQ ID NO: 11137 - DNA, 445 bp, Homo sapiens
ctgacgctggacaacaggctcgactcccagggcgtcctcagcaccccgtacttccccagctactactcgccccaaacccactgctcctggcacctcacggtgccctctctggactacggcttggccctctggtttgatgcctatgcactgaggaggcagaagtatgatttgccgtgcacccagggccagtggacgatccagaacaggagagtttgaatatctaagatgccagtcttggaagatgccaaaattggaaggctctggggctctagaattcttggatttctggggtgtgtgttcccaatcaccaacacttgtaatttgcttgttggctgatcctattcaaaaggatcatccagacaaaaggtgacgaagaatgacaaggtttgcttgactcctttttgcaatttatctgggactaggattaaaagaaaggagaagaaat

SEQ ID NO: 11138 - protein, 68 aa, Homo sapiens
MICRAPRASGRSRTGEFEYLRCQSWKMPKLEGSGALEFLDFWGVCSQSPTLVICLLADPIQKDHPDKR

SEQ ID NO: 11139 - DNA, 1694 bp, Homo sapiens
gttcttgagccagacccagtccagctctggtgcctgccctctggtgcgagctgacctgagatgcacttccctcctctgtgagctgtctcggcacccacttgcagtcactgccgcctgatgttgttactcttccactccaaaaggatgcccgtggccgaggccccccaggtggctggcgggcagggggacggaggtgatggcgaggaagcggagccggaggggatgttcaaggcctgtgaggactccaagagaaaagcccggggctacctccgcctggtgcccctgtttgtgctgctggccctgctcgtgctggcttcggcgggggtgctactctggtatttcctagggtacaaggcggaggtgatggtcagccaggtgtactcaggcagtctgcgtgtactcaatcgccacttctcccaggatcttacccgccgggaatctagtgccttccgcagtgaaaccgccaaagcccagaagatgctcaaggagctcatcaccagcacccgcctgggaacttactacaactccagctccgtctattcctttggggagggacccctcacctgcttcttctggttcattctccaaatccccgagcaccgccggctgatgctgagccccgaggtggtgcaggcactgctggtggaggagctgctgtccacagtcaacagctcggctgccgtcccctacagggccgagtacgaagtggaccccgagggcctagtgatcctggaagccagtgtgaaagacatagctgcattgaattccacgctgggttgttaccgctacagctacgtgggccagggccaggtcctccggctgaaggggcctgaccacctggcctccagctgcctgtggcacctgcagggccccaaggacctcatgctcaaactccggctggagtggacgctggcagagtgccgggaccgactggccatgtatgacgtggccgggcccctggagaagaggctcatcacctcggtgtacggctgcagccgccaggagcccgtggtggaggttctggcgtcgggggccatcatggcggtcgtctggaagaagggcctgcacagctactacgaccccttcgtgctctccgtgcagccggtggtcttccaggcctgtgaagtgaacctgacgctggacaacaggctcgactcccagggcgtcctcagcaccccgtacttccccagctactactcgccccaaacccactgctcctggcacctcacggtgccctctctggactacggcttggccctctggtttgatgcctatgcactgaggaggcagaagtatgatttgccgtgcacccagggccagtggacgatccagaacaggaggtaccacttcctctcctccctctggcttcctttcctccctccccctccctctcttccctcctcaatagtgaccccctcattggaagcccaagtccccaatctcagaggggcagcaaggggagcgagcagaggctggggctggtgtcaggcctgttgcccttgaccttgtcctcgtcccagcctccgccctggccccggcttcccctctggctaccccagaggtctcagacacgtttggtcatcagacaccttggatgtttattctaattacagcaaaattgtctcatcttcttgggtgctgtaaccccctctggcaccctcaatccttcaataaaatgtttccagagccaaagg

SEQ ID NO: 11140 - protein, 461 aa, Homo sapiens
MLLLFHSKRMPVAEAPQVAGGQGDGGDGEEAEPEGMFKACEDSKRKARGYLRLVPLFVLLALLVLASAGVLLWYFLGYKAEVMVSQVYSGSLRVLNRHFSQDLTRRESSAFRSETAKAQKMLKELITSTRLGTYYNSSSVYSFGEGPLTCFFWFILQIPEHRRLMLSPEVVQALLVEELLSTVNSSAAVPYRAEYEVDPEGLVILEASVKDIAALNSTLGCYRYSYVGQGQVLRLKGPDHLASSCLWHLQGPKDLMLKLRLEWTLAECRDRLAMYDVAGPLEKRLITSVYGCSRQEPVVEVLASGAIMAVVWKKGLHSYYDPFVLSVQPVVFQACEVNLTLDNRLDSQGVLSTPYFPSYYSPQTHCSWHLTVPSLDYGLALWFDAYALRRQKYDLPCTQGQWTIQNRRYHFLSSLWLPFLPPPPSLPSSIVTPSLEAQVPNLRGAARGASRGWGWCQACCP

SEQ ID NO: 11141 - DNA, 3237 bp, Homo sapiens
gtgctgccacctgaggaccttcctcctgagccgacctccttccgcctctttccagggctcctcctggctgcccgtctgcctgatgcagagaaacctccaagtttctcttgccacaggaaagggggcgaggagagcaggtccctggaaaggactgtggaggagaacccagcagctctggccagcaccagccaagaacgggagagtggccaggagcaggcagccacgtccctgtttggggagacgcccctgctggggagctcctccaagcctgccccagctccaatgcagagtccctttatcacaaacacgggagtgaattccagctgcagcagtcatcgcccctggctctcctcttgggtcttgggctgctgtgccaagaccttgcctgggacagtccgcaccagccaggtggacagacccgtggtggtgacagaccccacgtcatgtggctgggatcaacagaatggcccagaccacagtggacgctccctaagccctgagcccggagagcagcggcgtctcctgtgcagtcaccgtgcctgcagcggggagctgtcacctttccattttgcaggaaggggaggatttgtagaaagggcagtctctgtgggtgcctgcatccgcagctcctcttattataaggatacctgtcctagtagatcaggaccaccgtctggccctctgcagggagaggcagccgttcagggctgtgggtggcaaggggccacctgcacccatgagaggtacgaggccccctgcagcaggtcctcttctatcggcatctgcctgaagccgagcccaacaggacagctgcagcaggagctcccggggacggggctgtgtcctgttttcggtgccgagcacgaagagggcttctcagtcacactagccggtgaggaggagctggtcaggatgagtcccgacctgcaggcaccagctcccatggatgccccttctatgggtcaggcctctgaagcagtcccaggactggtggcttggtgtggggtgagagccgaggactccctcaagggttacaccattgccatcccctgcgtttttggccctaatgttgcgagcacaaaaacctcagtgtctgagttcctggatacagcaggccggaatcccattgagggagcccctccctgccagggtcccaggcccaccctgcacatccagaggcaagagaaaagggtctccagcgccaaaagaatctcctggggtgctcaagcccccagccctatgcaggatggagaatatcttgatggcgcgcgcggggcccgcacgtggaggccggcgcgggggcgcgggcagggccggctgctgagacgcgctgctgccccccgcgcgggcgccgcggcttcaatggcgccatcgcccaggaccggcagccggcaagatgcgaccgccctgcccagcatgtcctcaactttctgggcgttcatgatcctggccagcctgctcatcgcctactgcagtgaggcccgggctccaggccccgggtggcgcggcccgtccctgcccggcggtcggagcccagccagcggcttcccggccgagatgcgcgctcaggaggcagccgcaggtcgcggagggcgggcggcgctgccggggtgtctgcggagcgccctccccgtgcctcagcccgggacaaggggggaggcggcggccgagcccggagaggagctcttcaggcaggagcccagcctgggctcggaggagcagctggagcttccgctttcccgggaaacgggctcgtcaggcgccttctggaaagagaagcgaagtgagggatgggatgcccggagggggctcgccgcggccgcggacgtttctcgggtcgtgtctggggcccgagctggaggcctccccagcgttctggaaacagcctttcgccaggacaaggacaattggggggctgtggagctgcatggccagcggggcactgccatcagcctacagctttgtccacctgtggaccagtggggagcatccaccaagaaggcatcccaggccacacttgcagtcggcatctctgtctgcagtgatttggagcctgcagaaggcatcccctccagcccacagcagaggggggactgggcaccgagtggcatggggagaaccccgtggctgagccttgccgagcaaggggacagccgccaagagccaggtgtgcagttggagaaggagatggtcatcaagggccagaaagggcctgtttccccatggggcctcattcagagccaggatgtgcgcttggcctgcggaagagagggtggactttgtcctaaggtagaagagggagagcgggctggaaacactccaggtggtcgaccgggactgcccctaggggtcagtgtgagggtggccgtggaggtgactgtctgtgtgggggctgcactgttcagctcgaggctgcacctcacagaagccatgggcagccggcagctttatcccagctttgcaggagacaggctgggagagttgcccaattccaagggcacccctgaggcctcattgcacccggccctgctgcatccaatgcccaatgcaagcgggaggcccccggctccaggcgggacggggagtgtggagggcaccgccccagaggaagggacagtgcggggacttggggacagcccactgctggctcccccaggggtctccatcagtctcggtgggcaggtgtcgttcctccagcctgggaacgccttggagaaggccatacccacggcaagggtatgccaggagcaagctgtgacctggccccgggctgtggagcccatgctactctccactgaggatcctgggctgctctgtcccgcgtacgggcatccgggttctgatagcccgccgggccctgggccaccagaggccttgaattgcgtcctggtgacagtcagccccttgcatggggcacgcacagacctgggcctaggctggggcaccgagatccccacatccagcagccgcgagaggaggctggcgagaagtgtgccagggctcaggcggctggcgctggcctttgaaggcaccacaggccgcccaggcgaggtgcccacagctgccactgcacacccagatcgctggactgaacccatggtttctgattcaggggtcaggccggggccccagaagctgctgctgctgctggcctggccccgcgatggctctgatggcgtcgatgatgctgattctcagttaaggacgctgaagttcggaggtgccggaaacccgtga

SEQ ID NO: 11142 - protein, 984 aa, Homo sapiens [sequence omitted]

SEQ ID NO: 11143 - DNA, 994 bp, Homo sapiens
gatgctctgccctagaacaaacaacattctgccctcccatgatactcttctttaaaaccaacaacagtctgccttcccatgatgttctgcccaacagccaacaacagtctgccctcccatgatgctcttccctagaaccaacaacaatctcccctcccatgatgaaggaagcatcccgtgatgctctgctctacaatctgataacagccctctttcctgtgatgctatgctgtacagcctgacaacagtcttccttcccatgatgacctgccctacagcctgacaagagcctcccttctcatgatgccctgcccaacagctgacaacagttcgccctcccatgatgctgtttcccagaaccaacaacagtctgccctcccatgatgctctgccccacagccaacaacagtcttccttcccatgatgctctgccctacaaccgacagccacacctcccttggcaccaggatttgcctccagtctgacagccttccttcccagcatgccttgccctggcctgggcagtgttgtccacacccacatgagggtggtgtcggtgctgcccacgtcccagctgtgaggtcagccagccacagaagcagcagctgtggggacaagcttctgtgcgcagctctgtcgttcagcagctgtgtccttcagaaagccctggagctctctgggcctcaggtggcctttcggagtgtagacaacgccaacagctctgaccacagacagccatggcaggcaggtctgtcagtgactaaggaatatgcccagcagagacacggcaagaccacaaaccatcttgggaccctgagaaagaagacacggtgggcggattcaacagtcttatggggtcacaatgcacagggcttgtttcctatgaaagagagaatccacttaagaataaacttcagggctgggcacggtggctcacacctgtaatcccagcactttgggaggctgaggcgtgtggatcacctgaggtcaggag

SEQ ID NO: 11144 - protein, 174 aa, Homo sapiens [sequence omitted]

SEQ ID NO: 11145 - DNA, 532 bp, Homo sapiens
gtgcattaagaaaacacacgcgtggcttggccccggcacccagcccaggactagcactcaagcaagaggagctttggaaatgacagaaagccttggggagagagttccaccatcatgctcatgtgtgaagacactcagatgtgatggcagcacagccacctgtttgagtgtctctgtccccagggctggagggccaggatgtctttctcgggggtggagttagcaacccgccgaccagagcctgggcccggcctctgaagccggctctctgttcttcccatgttcctcccacctctccctgtgtgccacgagaagtcctctgaagcagattctgcagcgctgggtcccaagatggtttgtggtcttgccgtgtctctgctgggcatattccttagtcactgacagacctgcctgccatggctgtctgtggtcagagctgttggcgttgtctacactccgaaaggccacctgaggcccagagagctccagggctttctgaaggacacagctgctgaacgacagagctgcgcac

SEQ ID NO: 11146 - protein, 40 aa, Homo sapiens
MFLPPLPVCHEKSSEADSAALGPKMVCGLAVSLLGIFLSH

SEQ ID NO: 11147 - DNA, 392 bp, Homo sapiens
caacattggtaggatacagatgctgtgtgaaaagccacatgctggaacaaggttctgaatctttcagctgatgtggccaccctggttgctgtgggacacctgtctcctcctgccgtccaaaagagcaagaagcactaaactctgtcttcggtcagcatgactctcagcccatatgagactgtccagttgcaggaaaacaagctcagggctcccactgattctacatgatgcacttacaaattcatggactattatgaagacaagttaagagattgtgtcctccaaactcatcatttttcagaaattgtatcacaatcctacaagataaatgcacaagataattcttcaaatcattgagagtgtaatctataatcttcctaaacaacgaacag

SEQ ID NO: 11148 - protein, 37 aa, Homo sapiens
MDYYEDKLRDCVLQTHHFSEIVSQSYKINAQDNSSNH

SEQ ID NO: 11149 - DNA, 1077 bp, Homo sapiens
atgtggatgctgggagaagtatgtgagatggaaaagttgtttcatggcatccaagaagtgaatgatcctcaaggtgtagcagaggaatttgtaggagagagggatgattgacatcttcgtgtagccctccatccatcccagttagcatggagggattttagggctaccattggctgggtagtggagtgttgaccaatcacagctcaggggcgtgattgtctcgtcctgggatcgcgagaggtgtatatacagggaggccaggcagcctggagttagtcgaccgttgcgagacgttgagctgcggaagatgagtccaaagccgagagcctcgggacctccggccaaggccaaggaggcaggaaagaggaagtcctcctctcagccgagccccagtgacccgaagaagaagactaccaaggtggccaagaagggaaaagcagttcgtagagggagacgcgggaagaaaggggctgcgacaaagatggcggccgtgacggcacctgaggcggagagcgggccagcggcacccggccccagcgaccagcccagccaggagctccctcagcacgagctgccgccggaggagccagtgagcgaggggacccagcacgaccccctgagtcaggagagcgagctggaggaaccactgagtcaggagagcgaggtggaagaaccactgagtcaggagagccaggtggaggaaccactgagtcaggagagcgaggtggaagaaccactgagtcaggagagccaggtggaggaaccactgagtcaggagagcgaggtggaggaaccactgagtcaggagagcgaggtggaagaaccactgagtcaggagagccaggtggaggaaccactgagtcaggagagcgaggtggaagaaccactgagtcaggagagccaggtggaggaaccactgagtcaggagagcgagatggaaaactaccgagtgtgtagacggccaagtactcccctatctccgagagcagcgactaagttcaggcccagccgccagacctcagagatctcaccagcggggtgcttgccattctgatgataataaaatgaatgtgttgc

SEQ ID NO: 11150 - protein, 248 aa, Homo sapiens
MSPKPRASGPPAKAKEAGKRKSSSQPSPSDPKKKTTKVAKKGKAVRRGRRGKKGAATKMAAVTAPEAESGPAAPGPSDQPSQELPQHELPPEEPVSEGTQHDPLSQESELEEPLSQESEVEEPLSQESQVEEPLSQESEVEEPLSQESQVEEPLSQESEVEEPLSQESEVEEPLSQESQVEEPLSQESEVEEPLSQESQVEEPLSQESEMENYRVCRRPSTPLSPRAATKFRPSRQTSEISPAGCLPF

SEQ ID NO: 11151 - DNA, 612 bp, Homo sapiens
gttgcgagacgttgagctgcggaagatgagtccaaagccgagagcctcgggacctccggccaaggccaaggaggcaggaaagaggaagtcctcctctcagccgagccccagtgacccgaagaagaagactaccaaggtggccaagaagggaaaagcagttcgtagagggagacgcgggaagaaaggggctgcgacaaagatggcggccgtgacggcacctgaggcggagagcgggccagcggcacccggccccagcgaccagcccagccaggagctccctcagcacgagctgccgccggaggagccagtgagcgaggggacccagcacgaccccctgagtcaggagagcgagctggaggaaccactgagtcaggagagcgaggtggaagaaccactgagtcaggagagccaggtggaggaaccactgagtcaggagagcgaggtggaagaaccactgagtcaggagagccaggtggaggaaccactgagtcaggagagcgagatggaagaactaccgagtgtgtagacggccaagtactcccctatctccgagagcagcgactaagttcaggcccagccgccagacctcagagatctcaccagcggggtgct

SEQ ID NO: 11152 - protein, 166 aa, Homo sapiens
MSPKPRASGPPAKAKEAGKRKSSSQPSPSDPKKKTTKVAKKGKAVRRGRRGKKGAATKMAAVTAPEAESGPAAPGPSDQPSQELPQHELPPEEPVSEGTQHDPLSQESELEEPLSQESEVEEPLSQESQVEEPLSQESEVEEPLSQESQVEEPLSQESEMEELPSV

SEQ ID NO: 11153 - DNA, 367 bp, Homo sapiens
ggagagcgggccagcggcacccggccccagcgaccagcccagccaggagctccctcagcacgagctgccgccggaggagccagtgagcgaggggacccagcacgaccccctgagtcaggagagcgagctggaggaaccactgagtcaggagagcgaggtggaagaaccactgagtcaggagagccaggtggaggaaccactgagtcaggagagcgagatggaagaactaccgagtgtgtagacggccaagtactcccctatctccgagagcagcgactaagttcaggcccagccgccagacctcagagatctcaccagcggggtgcttgccattctgatgataataaaatgaatgtgttgcaaattg

SEQ ID NO: 11154 - protein, 44 aa, Homo sapiens
VRRARWKNYRVCRRPSTPLSPRAATKFRPSRQTSEISPAGCLPF

SEQ ID NO: 11155 - DNA, 6315 bp, Homo sapiens
ggtcggcgaggagggtccggccggagttgaaggattgaactttccggctcagtcgcggcgtctgcctggtcctcagcagtgcagccccggcgcggagcagggagcctcggcccgcgcccggcgccctcgccctcgccctcgacccgcagccatggtgcccggggtgcccggcgcggtcctgaccctctgcctctggctggcggcctccagcggctgcctggcggccggccccggcgcggctgctgcgcggcggctggacgagtcgctgtctgccgggagcgtccagcgcgctcgctgcgcctccaggtgcctgagcctgcagatcactcgcatctccgccttcttccagcacttccagaacaatggttccctggtttggtgccagaatcacaagcaatgttctaagtgcctggagccctgcaaggaatcaggggacctgaggaaacaccagtgccaaagcttttgtgagcctctcttccccaagaagagctacgaatgcttgaccagctgtgagttcctcaaatacatcctgttggtgaagcagggggactgtccggctcctgagaaagccagtggatttgcggccgcctgtgttgaaagctgcgaagttgacaatgagtgctctggggtgaagaaatgttgttcgaatgggtgtggacacacctgtcaagtacccaagactctgtacaaaggtgtccccctgaagcccagaaaagagttacgatttacagaactgcagtctggacagctggaggttaagtggtcctcgaaattcaatatttctattgagcctgtgatctatgtggtacaaagaagatggaattatggaatccatcctagcgaagatgacgccactcactggcagacagtggcccagaccacagacgagcgagttcaactgactgacataagacccagccgatggtaccagtttcgagtggctgctgtgaatgtgcatggaactcgaggcttcactgcccccagcaaacacttccgttcttccaaagatccatctgccccaccagcaccggctaacctccggctggccaactccaccgtcaacagtgatgggagtgtgaccgtcactatagtttgggatctccccgaggagccggacatccctgtgcatcattacaaggtcttttggagctggatggtcagcagtaagtctcttgtcccaacaaagaagaagcggagaaagactacggatgggtttcaaaattctgtgatcctggagaaactccagccagactgtgactatgttgtggaattgcaagccataacgtactggggacagacacggctgaagagtgcaaaggtgtcccttcacttcacatcgacacatgcaaccaacaacaaagaacagcttgtgaaaactagaaaaggtggaattcaaacacaactcccttttcaaagacgacgacccactcgcccgctggaagtcggagctcccttctatcaggatggccaactgcaagttaaagtctactggaagaagacagaagatcccactgtcaaccgatatcatgtgcggtggtttcctgaagcgtgtgcccacaacagaacaaccggatcagaggcatcatctggcatgacccacgaaaattacataattcttcaagatctgtcattttcctgcaagtataaggtgactgtccaaccaatacggccaaaaagtcactccaaggcagaagctgttttcttcactactccaccatgctctgctcttaaggggaagagccacaagcctgttggctgcctgggcgaagcaggtcatgttctttctaaggtgctagctaagcctgagaacctttctgcttcattcatcgtccaggatgtgaacatcaccggtcacttttcttggaagatggccaaggccaatctctatcagcccatgactgggtttcaagtgacttgggctgaggtcactacggaaagcagacagaacagcctacccaacagcattatttcacagtcccagatcctgccttccgatcattatgtcctaacagtgcccaatctgagaccatctactctttaccgactggaagtgcaagtgctgaccccaggaggggaggggccggccaccatcaagacgttccggacgccggagctcccaccctcttcagcacacagatctcatcttaagcatcgtcatccacatcattacaagccttctccagaaagatactaaactgttcaaaaagattttgtgaaattgcacagatgtgtaagcttgttgaacttcggccacgagacatgcacacttccagaggcagtgggaactgctcagaggcccggactctcctatgtgactttagtgcaggaagaacttctgtcaatcatggacgcatctggagacaagtgagaaacagtagattggtgaagacagacaccagttccctacaagcatggagaaaatgaagaataggcctgtttaatgctaaattttgttttcatgtatggtgtcgctcatttctattgaattacaacagaactcagttttccctgaatttggagcaccaaactccgccccaaaaaggagagtaacaaatacacaattcacacataacactaagcgtaaatctaatcaataaaatatatttttgactaaattattgattcgatatgaaaaatcaactaagattacacagctttgtttttttgaatctttcctaagatcatttttatcctaggtgatttttaaatgaaaatgtgtaatctaaaatataccagcgaatttaaatctaaaaatgctcctactttaagtaccttgtgctgctctttatgcaaaggtaaatcaaagttccctctataaattatgatttacaaaagacacccaagccagaggaactcaatgaaataagctgctaatcagattttaccttggagaaatgaaaattatttcttggggatgccttttaatatttgatcctattatgtgagagattttcctgatatgttatcttatttatattttcccttattttcctcaatgcagataatagcttttggtgcacttttgtttcaccatctgaaaattcacaaaacttcttgcttcaaatgaaaaaatcccaactattgagcatgtttaaatctttgcagagatttgccttttcttaatcaaagaaaggtctttgtgtgctagaatattattggtaatgttttaaaaattcctttgattgatagagaaggacagttatttgcatttaattcacccatatgctttcaaatctagtatatcttactttttggaaatgttttatgctacaaattagtgccttgtagcatgaacttaagtcaaaacgtgttatcaatatagagtgttgcagtgtatattgtaacaacctaaaacgcagagaagtttaatttaatactgttttttttcttgaaggaatactcacatacatggtttgaaatgtgcatagatatgcatgtctatataattataaatgcatgtgtatatatatgcaaatatatgtacatatacatgtatatacacacagacacatgcatatacatgaatataccttgagcatgaatccctggagaaatcgttttcgtagctcaccaatggtgagtaaagatacagctcttttaaaggtcataaggataatatattttccccatcaatgctgattctgagaaaagagcaatttatcaaaattaaacactgtaaaagaaaggtgtccatatgtctttacctacctaagtaaaacaggaagaaaatcagtaacattatccttaggttttgacaatggtacttgcttcttgttgttttattgtttcctgaattcatgcagatgcctggccattcctgggaagagtggataactcagaagtcactgtactccacagagcctcactgcagtgtctaaaggtagatgcaaattaaaatgcagggaaaataacttttctgatgttgatgcatgtctttgggaaacacatttataaacatggatacctgataatagatattgaaacccatttcctgtgtgttaaaatatttaaaaagtggatattccaggaatgttttgcagctttgtacaagtaacataaattggacacctcagaatgaaagttcatgttggttctgaatggttcactgcagctcctgtcacaagctgggatggatttatcacattgagttatgaaattacctggttctaagaatttttgagtggcaaaaatagaaaacaatcttcatttgaaaacatccctaagcttgaataaatggataccatagatagcttctcttttttattctggtgtcattaccagcatctgaatttcaagttcttaaaatttcaaaaattaaaatttttcattattagctatccatttatcttttacatgaacttgtcatgaacaaattcaaatgtttatgccagcaaatttttgtactgttgcatagttaaaaatgctgggagtctctgcatagatacaaaatattattaaattattacataaatttaattttataaaatttaatcatgcttcttttgtctgggtaatagacattggacagatatttttagttcagatggtgattctgaagcttacatctcccttaaaaaaatctaaagcagctcttatgggcttctaattttaatataaataaataatttaaattttattggtgttattggaagaaaaatgctattaatgggctaataaaaaacatgtgtttctcttatggattttaataagctccagtattattcaaatgatcaaaaatatagttataattttttgaattttaaaaatgtgattgctctaataaagaataaaatctatgctttttaacaaacatagttttggtgcctaattctgtaatatgttttattgaaattagattcatttctctaatgtgagaaaaatatatccagtaatagtattgactgtttaaaaaattgagctcatcaaaaatattgtcatcaaatacaggtggttaatctgacatacattgcagttacatgcattatttttatttacaacatttgctccttaatgatgaatttatctgtgttaccctgtttttctacctggaactccatagaatgatgtttgcaaaccaacatgtgctcttttcagtcattcactgttttaatatgacatggtagagaagataaggtttatggcaggtaattttttgtaatgtgtattaaacgaagttcaaagattagaaatacatctgtgtcctgaaaaccttagatacatagccgactgtatacagaggttcatctcaacctcaacactattgacttttggggctggatagttctctgttgtgggggtttgtcttgtgcactgtaggtttttagtagcatccacactttctcctcaccagatgccagttgcaccctcccccaagttgagacaaccaaaaatgtctccagatattgccagctaccccttgagggatggtacctctggttgagaaccattgctagagaatgatctttactgaatttgccctttataagaaacccagtgaatttctagagcaagtcccaaaaactaagggacagctaagaagttattatggttgacttcaaaggcctaaactgtgttttttatgtccactaaacaacttgattaaaagacggaattttgactcgtgtctgtatcatacaagtacaaatactaattttgccctatgtatccgtaaatgtcatttgtgattttgacttatttatttaatgccctttcttatgccgtgggttttcaagtttactcatttctatggttgcaaataactctaaaacttattatataaactttcatattataggcagaacacaatggctaaatatctgttgcatgtactttaaagtttattataaaatataaacagatatataaagatgttgactcttacctgtgattttgcatggtcagactcggtgtcaggtacggagaggattctcatgactgtcttacctctactgaatattctagtgagttatatgatttacggagtgattaacagaggtctatataaagttacttttcccctttacttaattatattgtagtgtgcagataacaaaactgctaccttctcatccaagtggtctgtagaattcatgtcccttacagtggtcatttaaagtcaatatttatttatgtatgtaataaaaaaagttggatttttgtgtatgtctgtcacattatttagagagaagtaatcttgtaaaaatgttttgtaaaaaacaaaaaagtattgtaaatagtcttgatattctgtgactcattattttcatgttagagtttgtacatactggttcaataataaagtatccttaaaccaga

SEQ ID NO: 11156 - protein, 680 aa, Homo sapiens
MVPGVPGAVLTLCLWLAASSGCLAAGPGAAAARRLDESLSAGSVQRARCASRCLSLQITRISAFFQHFQNNGSLVWCQNHKQCSKCLEPCKESGDLRKHQCQSFCEPLFPKKSYECLTSCEFLKYILLVKQGDCPAPEKASGFAAACVESCEVDNECSGVKKCCSNGCGHTCQVPKTLYKGVPLKPRKELRFTELQSGQLEVKWSSKFNISIEPVIYVVQRRWNYGIHPSEDDATHWQTVAQTTDERVQLTDIRPSRWYQFRVAAVNVHGTRGFTAPSKHFRSSKDPSAPPAPANLRLANSTVNSDGSVTVTIVWDLPEEPDIPVHHYKVFWSWMVSSKSLVPTKKKRRKTTDGFQNSVILEKLQPDCDYVVELQAITYWGQTRLKSAKVSLHFTSTHATNNKEQLVKTRKGGIQTQLPFQRRRPTRPLEVGAPFYQDGQLQVKVYWKKTEDPTVNRYHVRWFPEACAHNRTTGSEASSGMTHENYIILQDLSFSCKYKVTVQPIRPKSHSKAEAVFFTTPPCSALKGKSHKPVGCLGEAGHVLSKVLAKPENLSASFIVQDVNITGHFSWKMAKANLYQPMTGFQVTWAEVTTESRQNSLPNSIISQSQILPSDHYVLTVPNLRPSTLYRLEVQVLTPGGEGPATIKTFRTPELPPSSAHRSHLKHRHPHHYKPSPERY

SEQ ID NO: 11157 - DNA, 1715 bp, Homo sapiens
gttgctgagaagcactccacaagcacacactctcgttattccactccacacaactgtgaaggagggaggaagaggaaggatgaagaaaaggaagaaggaggaagaagggaggaaggaggaagcaggaaggaggaaggaggaagaagaaggcaggaaggaggaaggaggaagaagaaggcaggaaggaggaagaaggaagcaggaagaaggaaggaggaagaaggaaaaaggaaggaggaagaaggaaaagggaggtagaaagaaagaggaaggaagaagaaacaggaaagaggaagaaggaaggaggaagaaggaaggaggaaagaggatgaagaaaaataaaagcggaaggaggaagaaggaagcaggaaggagggagaaggaaggaggaagaaggaaagatggaggaggaagaaggaagtaggaagaaggaagatggaaggaagaaaaaagaagaaggaagtaggaaggagggaggaggaagaaggaagtaaggaggaaaaaggaagaatgaaggaggaagaaggcagtagaaaggaggaaggagggagagggaagtaggaaagaaaatggaggaagaggaagtaggaagaatgcaggaggaatcagggaaaaggaagaaggaagtaggaagaagaaaaaaggaagacaggaggaagtagaaaggaggaagaagttaggaggaagaagggggaaaaaggaagaagaagacgaaggaggaggacacactttttacacaaagttctgctaatttaacccttatgtgaaacagttaaatagcaactcctagtgagacagcaggcggaaagatttgaaggaaaactgttgctgccacaagggaagtttgatggcaggacttggagtgtgtatgcatgatgtactaattgaagcattagtacagtttctttgggggggtgtcagatgagtgtagaggaaccccctactctccacctttgcctagggcaatgtctgcatcagagattggtgccaacgtaataatcagcctcacagaaagttggattcagagtctggaaagatggaagatacaatctttacagcctatggatagaccctcctttccaaacttcagcgtttggaatcttagtacaatttctataccaaaggtgcttgccaaatgaaactctggatttacaacaaattgtgttttgaaaaatactgtatttgccaggcgcgcagcggctcatgcctgtaatcccagcactttgggaagccaaggcgggtggattacgaggtcaggagttcaaaaccagcctgaccaatatggtgaaaccccttctctactaaaaatacaaaaattaccgtggtggcaggcgcctgtaatcccagctacttgggaggctgaggcaggagaatcgcttgaacccacagggcagaggtcacagtgagccaagatcgtgacactgcactccagcctgggcgacagagtgaggctccgtcagagagagagagagacagagagaaagaaatatttaaattgctccagttcaaataagccggtaataagccaaaccacctgtctcatagagagctggagagagagaagggtcagcaagggaaatgataaaataaacaaatcactgctatgaaaatttatatggctcaccccgcctctgaaatgagagttcaaaatagaaatgcttgctccttaacacgggttatcataacgagatgcatttaatacatgagtttgctgg

SEQ ID NO: 11158 - protein, 114 aa, Homo sapiens [sequence omitted]

SEQ ID NO: 11159 - DNA, 1064 bp, Homo sapiens
atggctagtcaaaaccattcaaatctggttgcagcttgtctaaaccagtgtaaactggctgtggccagtcacaaccggactaaaccagttgtggctaaacaggctgacaccataaaacgggggcaaaaacatctggtgggtgtagaattgagtcgtcattttgtgcagggcgatggcagttgtaagagagaagcaaaacgacagctacatggagggaaggagctacgagtagccgccgagaggccgcggagccagcgacgacggagccagcgaccaccgacccagctgagccgccgcccccgccgcgcccccatggcggccaccaaggacactcatgaggaccatgatacttccactgagaatacagacgagttgaaccatgaccctcagtttgagccaatagtttctcttcctgagcaagaaattaaaacgctggaagaagatgaagaggaactttttaaaatgcgggcaaaatggttgcgatttgcctccgagaacgatctcccagaatggaaggagcgaggcactggtgacgtcaagctcctgaagcacaaggagaaaggggccatccgcctcctcatgcagagggacaaaaccctgaagatctgtgccaaccactacaccacgccgatgatggagctgaagcccaacgcaggtagcgaccgtgcctgggtctggaacacccacgctgacttcgccgacgagtgccccaagccagagctgctggccatccgcttcctgaatgctgagaatgcacagaaattcaaaacaaagtttgaagaatgcaggaaagagatcgaagagagagaaaagaaagcaggatcaggcaaaaacgatcatgccgaaaaagtggcggaaaagctagaagctctctcggtgaaggaagacaccaaggaggatgctgaggagaagcaataaatcgtcttattttattttcttttcctctctttcctttcctttttttaaaaaaattttaccctgcccctctttttcggtttttattctttcatttttacaagggacgttatataaataactgaattcaaaaaaaaaaaaaaagaaaa

SEQ ID NO: 11160 - protein, 305 aa, Homo sapiens; identical to SEQ ID NO: 1733

SEQ ID NO: 11161 - DNA, 577 bp, Homo sapiens
aaaaccaaaataggctgcttttaaggaagatgaaggaaagaagagacaaggttgttgacattagtataaaggtgctagaaaaatctgtcgactggctttaatcattcttcataagccctgaaaacagctggctgtctggttggatcagtcccccgtggcaaactcaggactctgcgttcccagtactggctcacagaatctggttgaatcaccaaaatgtgaagacaagccttcagttcccttcttgaccaccagcatggaactaaacaattaaacctgtcagaaaaaaaaaagctgctgtattttaaggtaacagagacatggactttttaaggtaacagagacatggacttgagaagacaacttggctcaattcctagctctgcaacttacttactaggtttgtgtctttggactgcatcctaacaaacaactgtgtcaagacatttgaacagcatattctacacaaataaaaaggaaatgataaagataaaagaaattaatagaatggaaagtgatggagataaacaagtgaaaagatggtcctttgaaaagactaaaacatggccaatgcact

SEQ ID NO: 11162 - protein, 31 aa, Homo sapiens
MIKIKEINRMESDGDKQVKRWSFEKTKTWPM

SEQ ID NO: 11163 - DNA, 13736 bp, Homo sapiens
tgttggtttctcattgtttttaagcctactggagcaataaagtttgaagaacttttaccaggttttttttatcgctgccttgatatacacttttcaaaatgctttggtgggaagaagtagaggactgttagtttgggaagcagcatattgagaacctcttcagtgacctacaggatgggaggcgcctcctagacctcctcgaaggcctgacagggcaaaaactgccaaaagaaaaaggatccacaagagttcatgccctgaacaatgtcaacaaggcactgcgggttttgcagaacaataatgttgatttagtgaatattggaagtactgacatcgtagatggaaatcataaactgactcttggtttgatttggaatataatcctccactggcaggtcaaaaatgtaatgaaaaatatcatggctggattgcaacaaaccaacagtgaaaagattctcctgagctgggtccgacaatcaactcgtaattatccacaggttaatgtaatcaacttcaccaccagctggtctgatggcctggctttgaatgctctcatccatagtcataggccagacctatttgactggaatagtgtggtttgccagcagtcagccacacaacgactggaacatgcattcaacatcgccagatatcaattaggcatagagaaactactcgatcctgaagatgttgataccacctatccagataagaagtccatcttaatgtacatcacatcactcttccaagttttgcctcaacaagtgagcattgaagccatccaggaagtggaaatgttgccaaggccacctaaagtgactaaagaagaacattttcagttacatcatcaaatgcactattctcaacagatcacggtcagtctagcacagggatatgagagaacttcttcccctaagcctcgattcaagagctatgcctacacacaggctgcttatgtcaccacctctgaccctacacggagcccatttccttcacagcatttggaagctcctgaagacaagtcatttggcagttcattgatggagagtgaagtaaacctggaccgttatcaaacagctttagaagaagtattatcgtggcttctttctgctgaggacacattgcaagcacaaggagagatttctaatgatgtggaagtggtgaaagaccagtttcatactcatgaggggtacatgatggatttgacagcccatcagggccgggttggtaatattctacaattgggaagtaagctgattggaacaggaaaattatcagaagatgaagaaactgaagtacaagagcagatgaatctcctaaattcaagatgggaatgcctcagggtagctagcatggaaaaacaaagcaatttacatagagttttaatggatctccagaatcagaaactgaaagagttgaatgactggctaacaaaaacagaagaaagaacaaggaaaatggaggaagagcctcttggacctgatcttgaagacctaaaacgccaagtacaacaacataaggtgcttcaagaagatctagaacaagaacaagtcagggtcaattctctcactcacatggtggtggtagttgatgaatctagtggagatcacgcaactgctgctttggaagaacaacttaaggtattgggagatcgatgggcaaacatctgtagatggacagaagaccgctgggttcttttacaagacatccttctcaaatggcaacgtcttactgaagaacagtgcctttttagtgcatggctttcagaaaaagaagatgcagtgaacaagattcacacaactggctttaaagatcaaaatgaaatgttatcaagtcttcaaaaactggccgttttaaaagcggatctagaaaagaaaaagcaatccatgggcaaactgtattcactcaaacaagatcttctttcaacactgaagaataagtcagtgacccagaagacggaagcatggctggataactttgcccggtgttgggataatttagtccaaaaacttgaaaagagtacagcacagatttcacaggctgtcaccaccactcagccatcactaacacagacaactgtaatggaaacagtaactacggtgaccacaagggaacagatcctggtaaagcatgctcaagaggaacttccaccaccacctccccaaaagaagaggcagattactgtggattctgaaattaggaaaaggttggatgttgatataactgaacttcacagctggattactcgctcagaagctgtgttgcagagtcctgaatttgcaatctttcggaaggaaggcaacttctcagacttaaaagaaaaagtcaatgccatagagcgagaaaaagctgagaagttcagaaaactgcaagatgccagcagatcagctcaggccctggtggaacagatggtgaatgagggtgttaatgcagatagcatcaaacaagcctcagaacaactgaacagccggtggatcgaattctgccagttgctaagtgagagacttaactggctggagtatcagaacaacatcatcgctttctataatcagctacaacaattggagcagatgacaactactgctgaaaactggttgaaaatccaacccaccaccccatcagagccaacagcaattaaaagtcagttaaaaatttgtaaggatgaagtcaaccggctatcagatcttcaacctcaaattgaacgattaaaaattcaaagcatagccctgaaagagaaaggacaaggacccatgttcctggatgcagactttgtggcctttacaaatcattttaagcaagtcttttctgatgtgcaggccagagagaaagagctacagacaatttttgacactttgccaccaatgcgctatcaggagaccatgagtgccatcaggacatgggtccagcagtcagaaaccaaactctccatacctcaacttagtgtcaccgactatgaaatcatggagcagagactcggggaattgcaggctttacaaagttctctgcaagagcaacaaagtggcctatactatctcagcaccactgtgaaagagatgtcgaagaaagcgccctctgaaattagccggaaatatcaatcagaatttgaagaaattgagggacgctggaagaagctctcctcccagctggttgagcattgtcaaaagctagaggagcaaatgaataaactccgaaaaattcagaatcacatacaaaccctgaagaaatggatggctgaagttgatgtttttctgaaggaggaatggcctgcccttggggattcagaaattctaaaaaagcagctgaaacagtgcagacttttagtcagtgatattcagacaattcagcccagtctaaacagtgtcaatgaaggtgggcagaagataaagaatgaagcagagccagagtttgcttcgagacttgagacagaactcaaagaacttaacactcagtgggatcacatgtgccaacaggtctatgccagaaaggaggccttgaagggaggtttggagaaaactgtaagcctccagaaagatctatcagagatgcacgaatggatgacacaagctgaagaagagtatcttgagagagattttgaatataaaactccagatgaattacagaaagcagttgaagagatgaagagagctaaagaagaggcccaacaaaaagaagcgaaagtgaaactccttactgagtctgtaaatagtgtcatagctcaagctccacctgtagcacaagaggccttaaaaaaggaacttgaaactctaaccaccaactaccagtggctctgcactaggctgaatgggaaatgcaagactttggaagaagtttgggcatgttggcatgagttattgtcatacttggagaaagcaaacaagtggctaaatgaagtagaatttaaacttaaaaccactgaaaacattcctggcggagctgaggaaatctctgaggtgctagattcacttgaaaatttgatgcgacattcagaggataacccaaatcagattcgcatattggcacagaccctaacagatggcggagtcatggatgagctaatcaatgaggaacttgagacatttaattctcgttggagggaactacatgaagaggctgtaaggaggcaaaagttgcttgaacagagcatccagtctgcccaggagactgaaaaatccttacacttaatccaggagtccctcacattcattgacaagcagttggcagcttatattgcagacaaggtggacgcagctcaaatgcctcaggaagcccagaaaatccaatctgatttgacaagtcatgagatcagtttagaagaaatgaagaaacataatcaggggaaggaggctgcccaaagagtcctgtctcagattgatgttgcacagaaaaaattacaagatgtctccatgaagtttcgattattccagaaaccagccaattttgagcagcgtctacaagaaagtaagatgattttagatgaagtgaagatgcacttgcctgcattggaaacaaagagtgtggaacaggaagtagtacagtcacagctaaatcattgtgtgaacttgtataaaagtctgagtgaagtgaagtctgaagtggaaatggtgataaagactggacgtcagattgtacagaaaaagcagacggaaaatcccaaagaacttgatgaaagagtaacagctttgaaattgcattataatgagctgggagcaaaggtaacagaaagaaagcaacagttggagaaatgcttgaaattgtcccgtaagatgcgaaaggaaatgaatgtcttgacagaatggctggcagctacagatatggaattgacaaagagatcagcagttgaaggaatgcctagtaatttggattctgaagttgcctggggaaaggctactcaaaaagagattgagaaacagaaggtgcacctgaagagtatcacagaggtaggagaggccttgaaaacagttttgggcaagaaggagacgttggtggaagataaactcagtcttctgaatagtaactggatagctgtcacctcccgagcagaagagtggttaaatcttttgttggaataccagaaacacatggaaacttttgaccagaatgtggaccacatcacaaagtggatcattcaggctgacacacttttggatgaatcagagaaaaagaaaccccagcaaaaagaagacgtgcttaagcgtttaaaggcagaactgaatgacatacgcccaaaggtggactctacacgtgaccaagcagcaaacttgatggcaaaccgcggtgaccactgcaggaaattagtagagccccaaatctcagagctcaaccatcgatttgcagccatttcacacagaattaagactggaaaggcctccattcctttgaaggaattggagcagtttaactcagatatacaaaaattgcttgaaccactggaggctgaaattcagcagggggtgaatctgaaagaggaagacttcaataaagatatgaatgaagacaatgagggtactgtaaaagaattgttgcaaagaggagacaacttacaacaaagaatcacagatgagagaaagcgagaggaaataaagataaaacagcagctgttacagacaaaacataatgctctcaaggatttgaggtctcaaagaagaaaaaaggctctagaaatttctcatcagtggtatcagtacaagaggcaggctgatgatctcctgaaatgcttggatgacattgaaaaaaaattagccagcctacctgagcccagagatgaaaggaaaataaaggaaattgatcgggaattgcagaagaagaaagaggagctgaatgcagtgcgtaggcaagctgagggcttgtctgaggatggggccgcaatggcagtggagccaactcagatccagctcagcaagcgctggcgggaaattgagagcaaatttgctcagtttcgaagactcaactttgcacaaattcacactgtccgtgaagaaacgatgatggtgatgactgaagacatgcctttggaaatttcttatgtgccttctacttatttgactgaaatcactcatgtctcacaagccctattagaagtggaacaacttctcaatgctcctgacctctgtgctaaggactttgaagatctctttaagcaagaggagtctctgaagaatataaaagatagtctacaacaaagctcaggtcggattgacattattcatagcaagaagacagcagcattgcaaagtgcaacgcctgtggaaagggtgaagctacaggaagctctctcccagcttgatttccaatgggaaaaagttaacaaaatgtacaaggaccgacaagggcgatttgacagatctgttgagaaatggcggcgttttcattatgatataaagatatttaatcagtggctaacagaagctgaacagtttctcagaaagacacaaattcctgagaattgggaacatgctaaatacaaatggtatcttaaggaactccaggatggcattgggcagcggcaaactgttgtcagaacattgaatgcaactggggaagaaataattcagcaatcctcaaaaacagatgccagtattctacaggaaaaattgggaagcctgaatctgcggtggcaggaggtctgcaaacagctgtcagacagaaaaaagaggctagaagaacaaaagaatatcttgtcagaatttcaaagagatttaaatgaatttgttttatggttggaggaagcagataacattgctagtatcccacttgaacctggaaaagagcagcaactaaaagaaaagcttgagcaagtcaagttactggtggaagagttgcccctgcgccagggaattctcaaacaattaaatgaaactggaggacccgtgcttgtaagtgctcccataagcccagaagagcaagataaacttgaaaataagctcaagcagacaaatctccagtggataaaggtttccagagctttacctgagaaacaaggagaaattgaagctcaaataaaagaccttgggcagcttgaaaaaaagcttgaagaccttgaagagcagttaaatcatctgctgctgtggttatctcctattaggaatcagttggaaatttataaccaaccaaaccaagaaggaccatttgacgttaaggaaactgaaatagcagttcaagctaaacaaccggatgtggaagagattttgtctaaagggcagcatttgtacaaggaaaaaccagccactcagccagtgaagaggaagttagaagatctgagctctgagtggaaggcggtaaaccgtttacttcaagagctgagggcaaagcagcctgacctagctcctggactgaccactattggagcctctcctactcagactgttactctggtgacacaacctgtggttactaaggaaactgccatctccaaactagaaatgccatcttccttgatgttggaggtacctgctctggcagatttcaaccgggcttggacagaacttaccgactggctttctctgcttgatcaagttataaaatcacagagggtgatggtgggtgaccttgaggatatcaacgagatgatcatcaagcagaaggcaacaatgcaggatttggaacagaggcgtccccagttggaagaactcattaccgctgcccaaaatttgaaaaacaagaccagcaatcaagaggctagaacaatcattacggatcgaattgaaagaattcagaatcagtgggatgaagtacaagaacaccttcagaaccggaggcaacagttgaatgaaatgttaaaggattcaacacaatggctggaagctaaggaagaagctgagcaggtcttaggacaggccagagccaagcttgagtcatggaaggagggtccctatacagtagatgcaatccaaaagaaaatcacagaaaccaagcagttggccaaagacctccgccagtggcagacaaatgtagatgtggcaaatgacttggccctgaaacttctccgggattattctgcagatgataccagaaaagtccacatgataacagagaatatcaatgcctcttggagaagcattcataaaagggtgagtgagcgagaggctgctttggaagaaactcatagattactgcaacagttccccctggacctggaaaagtttcttgcctggcttacagaagctgaaacaactgccaatgtcctacaggatgctacccgtaaggaaaggctcctagaagactccaagggagtaaaagagctgatgaaacaatggcaagacctccaaggtgaaattgaagctcacacagatgtttatcacaacctggatgaaaacagccaaaaaatcctgagatccctggaaggttccgatgatgcagtcctgttacaaagacgtttggataacatgaacttcaagtggagtgaacttcggaaaaagtctctcaacattaggtcccatttggaagccagttctgaccagtggaagcgtctgcacctttctctgcaggaacttctggtgtggctacagctgaaagatgatgaattaagccggcaggcacctattggaggcgactttccagcagttcagaagcagaacgatgtacatagggccttcaagagggaattgaaaactaaagaacctgtaatcatgagtactcttgagactgtacgaatatttctgacagagcagcctttggaaggactagagaaactctaccaggagcccagagagctgcctcctgaggagagagcccagaatgtcactcggcttctacgaaagcaggctgaggaggtcaatactgagtgggaaaaattgaacctgcactccgctgactggcagagaaaaatagatgagacccttgaaagactccgggaacttcaagaggccacggatgagctggacctcaagctgcgccaagctgaggtgatcaagggatcctggcagcccgtgggcgatctcctcattgactctctccaagatcacctcgagaaagtcaaggcacttcgaggagaaattgcgcctctgaaagagaacgtgagccacgtcaatgaccttgctcgccagcttaccactttgggcattcagctctcaccgtataacctcagcactctggaagacctgaacaccagatggaagcttctgcaggtggccgtcgaggaccgagtcaggcagctgcatgaagcccacagggactttggtccagcatctcagcactttctttccacgtctgtccagggtccctgggagagagccatctcgccaaacaaagtgccctactatatcaaagctgacctgaataatgtcagattctcagcttataggactgccatgaaactccgaagactgcagaaggccctttgcttggatctcttgagcctgtcagctgcatgtgatgccttggaccagcacaacctcaagcaaaatgaccagcccatggatatcctgcagattattaattgtttgaccactatttatgaccgcctggagcaagagcacaacaatttggtcaacgtccctctctgcgtggatatgtgtctgaactggctgctgaatgtttatgatacgggacgaacagggaggatccgtgtcctgtcttttaaaactggcatcatttccctgtgtaaagcacatttggaagacaagtacagataccttttcaagcaagtggcaagttcaacaggattttgtgaccagcgcaggctgggcctccttctgcatgattctatccaaattccaagacagttgggtgaagttgcatcctttgggggcagtaacattgagccaagtgtccggagctgcttccaatttgctaataataagccagagatcgaagcggccctcttcctagactggatgagactggaaccccagtccatggtgtggctgcccgtcctgcacagagtggctgctgcagaaactgccaagcatcaggccaaatgtaacatctgcaaagagtgtccaatcattggattcaggtacaggagtctaaagcactttaattatgacatctgccaaagctgctttttttctggtcgagttgcaaaaggccataaaatgcactatcccatggtggaatattgcactccgactacatcaggagaagatgttcgagactttgccaaggtactaaaaaacaaatttcgaaccaaaaggtattttgcgaagcatccccgaatgggctacctgccagtgcagactgtcttagagggggacaacatggaaactcccgttactctgatcaacttctggccagtagattctgcgcctgcctcgtcccctcagctttcacacgatgatactcattcacgcattgaacattatgctagcaggctagcagaaatggaaaacagcaatggatcttatctaaatgatagcatctctcctaatgagagcatagatgatgaacatttgttaatccagcattactgccaaagtttgaaccaggactcccccctgagccagcctcgtagtcctgcccagatcttgatttccttagagagtgaggaaagaggggagctagagagaatcctagcagatcttgaggaagaaaacaggaatctgcaagcagaatatgaccgtctaaagcagcagcacgaacataaaggcctgtccccactgccgtcccctcctgaaatgatgcccacctctccccagagtccccgggatgctgagctcattgctgaggccaagctactgcgtcaacacaaaggccgcctggaagccaggatgcaaatcctggaagaccacaataaacagctggagtcacagttacacaggctaaggcagctgctggagcaaccccaggcagaggccaaagtgaatggcacaacggtgtcctctccttctacctctctacagaggtccgacagcagtcagcctatgctgctccgagtggttggcagtcaaacttcggactccatgggtgaggaagatcttctcagtcctccccaggacacaagcacagggttagaggaggtgatggagcaactcaacaactccttccctagttcaagaggaagaaatacccctggaaagccaatgagagaggacacaatgtaggaagtcttttccacatggcagatgatttgggcagagcgatggagtccttagtatcagtcatgacagatgaagaaggagcagaataaatgttttacaactcctgattcccgcatggtttttataatattcatacaacaaagaggattagacagtaagagtttacaagaaataaatctatatttttgtgaagggtagtggtattatactgtagatttcagtagtttctaagtctgttattgttttgttaacaatggcaggttttacacgtctatgcaattgtacaaaaaagttataagaaaactacatgtaaaatcttgatagctaaataacttgccatttctttatatggaacgcattttgggttgtttaaaaatttataacagttataaagaaagattgtaaactaaagtgtgctttataaaaaaaagttgtttataaaaacccctaaaaacaaaacaaacacacacacacacacatacacacacacacacaaaactttgaggcagcgcattgttttgcatccttttggcgtgatatccatatgaaattcatggctttttctttttttgcatattaaagataagacttcctctaccaccacaccaaatgactactacacactgctcatttgagaactgtcagctgagtggggcaggcttgagttttcatttcatatatctatatgtctataagtatataaatactatagttatatagataaagagatacgaatttctatagactgactttttccattttttaaatgttcatgtcacatcctaatagaaagaaattacttctagtcagtcatccaggcttacctgcttggtctagaatggatttttcccggagccggaagccaggaggaaactacaccacactaaaacattgtctacagctccagatgtttctcattttaaacaactttccactgacaacgaaagtaaagtaaagtattggatttttttaaagggaacatgtgaatgaatacacaggacttattatatcagagtgagtaatcggttggttggttgattgattgattgattgatacattcagcttcctgctgctagcaatgccacgatttagatttaatgatgcttcagtggaaatcaatcagaaggtattctgaccttgtgaacatcagaaggtattttttaactcccaagcagtagcaggacgatgatagggctggagggctatggattcccagcccatccctgtgaaggagtaggccactctttaagtgaaggattggatgattgttcataatacataaagttctctgtaattacaactaaattattatgccctcttctcacagtcaaaaggaactgggtggtttggtttttgttgcttttttagatttattgtcccatgtgggatgagtttttaaatgccacaagacataatttaaaataaataaactttgggaaaaggtgtaaaacagtagccccatcacatttgtgatactgacaggtatcaacccagaagcccatgaactgtgtttccatcctttgcatttctctgcgagtagttccacacaggtttgtaagtaagtaagaaagaaggcaaattgattcaaatgttacaaaaaaacccttcttggtggattagacaggttaaatatataaacaaacaaacaaaaattgctcaaaaaagaggagaaaagctcaagaggaaaagctaaggactggtaggaaaaagctttactctttcatgccattttatttctttttgatttttaaatcattcattcaatagataccaccgtgtgacctataattttgcaaatctgttacctctgacatcaagtgtaattagcttttggagagtgggctgacatcaagtgtaattagcttttggagagtgggttttgtccattattaataattaattaattaacatcaaacacggcttctcatgctatttctacctcactttggttttggggtgttcctgataattgtgcacacctgagttcacagcttcaccacttgtccattgcgttattttctttttcctttataattctttctttttccttcataattttcaaaagaaaacccaaagctctaaggtaacaaattaccaaattacatgaagatttggtttttgtcttgcatttttttcctttatgtgacgctggaccttttctttacccaaggatttttaaaactcagatttaaaacaaggggttactttacatcctactaagaagtttaagtaagtaagtttcattctaaaatcagaggtaaatagagtgcataaataattttgttttaatctttttgtttttcttttagacacattagctctggagtgagtctgtcataatatttgaacaaaaattgagagctttattgctgcattttaagcataattaatttggacattatttcgtgttgtgttctttataaccaccaagtattaaactgtaaatcataatgtaactgaagcataaacatcacatggcatgttttgtcattgttttcaggtactgagttcttacttgagtatcataatatattgtgttttaacaccaacactgtaacatttacgaattatttttttaaacttcagttttactgcattttcacaacatatcagacttcaccaaatatatgccttactattgtattatagtactgctttactgtgtatctcaataaagcacgcagttatgttacaaaaaagta

SEQ ID NO: 11164 - protein, 3542 aa, Homo sapiens
MKNIMAGLQQTNSEKILLSWVRQSTRNYPQVNVINFTTSWSDGLALNALIHSHRPDLFDWNSVVCQQSATQRLEHAFNIARYQLGIEKLLDPEDVDTTYPDKKSILMYITSLFQVLPQQVSIEAIQEVEMLPRPPKVTKEEHFQLHHQMHYSQQITVSLAQGYERTSSPKPRFKSYAYTQAAYVTTSDPTRSPFPSQHLEAPEDKSFGSSLMESEVNLDRYQTALEEVLSWLLSAEDTLQAQGEISNDVEVVKDQFHTHEGYMMDLTAHQGRVGNILQLGSKLIGTGKLSEDEETEVQEQMNLLNSRWECLRVASMEKQSNLHRVLMDLQNQKLKELNDWLTKTEERTRKMEEEPLGPDLEDLKRQVQQHKVLQEDLEQEQVRVNSLTHMVVVVDESSGDHATAALEEQLKVLGDRWANICRWTEDRWVLLQDILLKWQRLTEEQCLFSAWLSEKEDAVNKIHTTGFKDQNEMLSSLQKLAVLKADLEKKKQSMGKLYSLKQDLLSTLKNKSVTQKTEAWLDNFARCWDNLVQKLEKSTAQISQAVTTTQPSLTQTTVMETVTTVTTREQILVKHAQEELPPPPPQKKRQITVDSEIRKRLDVDITELHSWITRSEAVLQSPEFAIFRKEGNFSDLKEKVNAIEREKAEKFRKLQDASRSAQALVEQMVNEGVNADSIKQASEQLNSRWIEFCQLLSERLNWLEYQNNIIAFYNQLQQLEQMTTTAENWLKIQPTTPSEPTAIKSQLKICKDEVNRLSDLQPQIERLKIQSIALKEKGQGPMFLDADFVAFTNHFKQVFSDVQAREKELQTIFDTLPPMRYQETMSAIRTWVQQSETKLSIPQLSVTDYEIMEQRLGELQALQSSLQEQQSGLYYLSTTVKEMSKKAPSEISRKYQSEFEEIEGRWKKLSSQLVEHCQKLEEQMNKLRKIQNHIQTLKKWMAEVDVFLKEEWPALGDSEILKKQLKQCRLLVSDIQTIQPSLNSVNEGGQKIKNEAEPEFASRLETELKELNTQWDHMCQQVYARKEALKGGLEKTVSLQKDLSEMHEWMTQAEEEYLERDFEYKTPDELQKAVEEMKRAKEEAQQKEAKVKLLTESVNSVIAQAPPVAQEALKKELETLTTNYQWLCTRLNGKCKTLEEVWACWHELLSYLEKANKWLNEVEFKLKTTENIPGGAEEISEVLDSLENLMRHSEDNPNQIRILAQTLTDGGVMDELINEELETFNSRWRELHEEAVRRQKLLEQSIQSAQETEKSLHLIQESLTFIDKQLAAYIADKVDAAQMPQEAQKIQSDLTSHEISLEEMKKHNQGKEAAQRVLSQIDVAQKKLQDVSMKFRLFQKPANFEQRLQESKMILDEVKMHLPALETKSVEQEVVQSQLNHCVNLYKSLSEVKSEVEMVIKTGRQIVQKKQTENPKELDERVTALKLHYNELGAKVTERKQQLEKCLKLSRKMRKEMNVLTEWLAATDMELTKRSAVEGMPSNLDSEVAWGKATQKEIEKQKVHLKSITEVGEALKTVLGKKETLVEDKLSLLNSNWIAVTSRAEEWLNLLLEYQKHMETFDQNVDHITKWIIQADTLLDESEKKKPQQKEDVLKRLKAELNDIRPKVDSTRDQAANLMANRGDHCRKLVEPQISELNHRFAAISHRIKTGKASIPLKELEQFNSDIQKLLEPLEAEIQQGVNLKEEDFNKDMNEDNEGTVKELLQRGDNLQQRITDERKREEIKIKQQLLQTKHNALKDLRSQRRKKALEISHQWYQYKRQADDLLKCLDDIEKKLASLPEPRDERKIKEIDRELQKKKEELNAVRRQAEGLSEDGAAMAVEPTQIQLSKRWREIESKFAQFRRLNFAQIHTVREETMMVMTEDMPLEISYVPSTYLTEITHVSQALLEVEQLLNAPDLCAKDFEDLFKQEESLKNIKDSLQQSSGRIDIIHSKKTAALQSATPVERVKLQEALSQLDFQWEKVNKMYKDRQGRFDRSVEKWRRFHYDIKIFNQWLTEAEQFLRKTQIPENWEHAKYKWYLKELQDGIGQRQTVVRTLNATGEEIIQQSSKTDASILQEKLGSLNLRWQEVCKQLSDRKKRLEEQKNILSEFQRDLNEFVLWLEEADNIASIPLEPGKEQQLKEKLEQVKLLVEELPLRQGILKQLNETGGPVLVSAPISPEEQDKLENKLKQTNLQWIKVSRALPEKQGEIEAQIKDLGQLEKKLEDLEEQLNHLLLWLSPIRNQLEIYNQPNQEGPFDVKETEIAVQAKQPDVEEILSKGQHLYKEKPATQPVKRKLEDLSSEWKAVNRLLQELRAKQPDLAPGLTTIGASPTQTVTLVTQPVVTKETAISKLEMPSSLMLEVPALADFNRAWTELTDWLSLLDQVIKSQRVMVGDLEDINEMIIKQKATMQDLEQRRPQLEELITAAQNLKNKTSNQEARTIITDRIERIQNQWDEVQEHLQNRRQQLNEMLKDSTQWLEAKEEAEQVLGQARAKLESWKEGPYTVDAIQKKITETKQLAKDLRQWQTNVDVANDLALKLLRDYSADDTRKVHMITENINASWRSIHKRVSEREAALEETHRLLQQFPLDLEKFLAWLTEAETTANVLQDATRKERLLEDSKGVKELMKQWQDLQGEIEAHTDVYHNLDENSQKILRSLEGSDDAVLLQRRLDNMNFKWSELRKKSLNIRSHLEASSDQWKRLHLSLQELLVWLQLKDDELSRQAPIGGDFPAVQKQNDVHRAFKRELKTKEPVIMSTLETVRIFLTEQPLEGLEKLYQEPRELPPEERAQNVTRLLRKQAEEVNTEWEKLNLHSADWQRKIDETLERLRELQEATDELDLKLRQAEVIKGSWQPVGDLLIDSLQDHLEKVKALRGEIAPLKENVSHVNDLARQLTTLGIQLSPYNLSTLEDLNTRWKLLQVAVEDRVRQLHEAHRDFGPASQHFLSTSVQGPWERAISPNKVPYYIKADLNNVRFSAYRTAMKLRRLQKALCLDLLSLSAACDALDQHNLKQNDQPMDILQIINCLTTIYDRLEQEHNNLVNVPLCVDMCLNWLLNVYDTGRTGRIRVLSFKTGIISLCKAHLEDKYRYLFKQVASSTGFCDQRRLGLLLHDSIQIPRQLGEVASFGGSNIEPSVRSCFQFANNKPEIEAALFLDWMRLEPQSMVWLPVLHRVAAAETAKHQAKCNICKECPIIGFRYRSLKHFNYDICQSCFFSGRVAKGHKMHYPMVEYCTPTTSGEDVRDFAKVLKNKFRTKRYFAKHPRMGYLPVQTVLEGDNMETPVTLINFWPVDSAPASSPQLSHDDTHSRIEHYASRLAEMENSNGSYLNDSISPNESIDDEHLLIQHYCQSLNQDSPLSQPRSPAQILISLESEERGELERILADLEEENRNLQAEYDRLKQQHEHKGLSPLPSPPEMMPTSPQSPRDAELIAEAKLLRQHKGRLEARMQILEDHNKQLESQLHRLRQLLEQPQAEAKVNGTTVSSPSTSLQRSDSSQPMLLRVVGSQTSDSMGEEDLLSPPQDTSTGLEEVMEQLNNSFPSSRGRNTPGKPMREDTM

SEQ ID NO: 11165 - DNA, 3855 bp, Homo sapiens
atgcgaaaggggagctgttggaattcaaatagactttctggttcccagcagtcggcagtaatagaatgctttcaggaagatgacagaatcaggagaaagatgctgttttgcactatcttgatttgttacagcagccaacttattggcatgatggagtgacaggaaaaacagctggcatggaagatgaaagagaagatgttcaaaagaaaacattcacaaaatgggtaaatgcacaattttctaagtttgggaagcagcatattgagaacctcttcagtgacctacaggatgggaggcgcctcctagacctcctcgaaggcctgacagggcaaaaactgccaaaagaaaaaggatccacaagagttcatgccctgaacaatgtcaacaaggcactgcgggttttgcagaacaataatgttgatttagtgaatattggaagtactgacatcgtagatggaaatcataaactgactcttggtttgatttggaatataatcctccactggcaggtcaaaaatgtaatgaaaaatatcatggctggattgcaacaaaccaacagtgaaaagattctcctgagctgggtccgacaatcaactcgtaattatccacaggttaatgtaatcaacttcaccaccagctggtctgatggcctggctttgaatgctctcatccatagtcataggccagacctatttgactggaatagtgtggtttgccagcagtcagccacacaacgactggaacatgcattcaacatcgccagatatcaattaggcatagagaaactactcgatcctgaagatgttgataccacctatccagataagaagtccatcttaatgtacatcacatcactcttccaagttttgcctcaacaagtgagcattgaagccatccaggaagtggaaatgttgccaaggccacctaaagtgactaaagaagaacattttcagttacatcatcaaatgcactattctcaacagatcacggtcagtctagcacagggatatgagagaacttcttcccctaagcctcgattcaagagctatgcctacacacaggctgcttatgtcaccacctctgaccctacacggagcccatttccttcacagcatttggaagctcctgaagacaagtcatttggcagttcattgatggagagtgaagtaaacctggaccgttatcaaacagctttagaagaagtattatcgtggcttctttctgctgaggacacattgcaagcacaaggagagatttctaatgatgtggaagtggtgaaagaccagtttcatactcatgaggggtacatgatggatttgacagcccatcagggccgggttggtaatattctacaattgggaagtaagctgattggaacaggaaaattatcagaagatgaagaaactgaagtacaagagcagatgaatctcctaaattcaagatgggaatgcctcagggtagctagcatggaaaaacaaagcaatttacatagagttttaatggatctccagaatcagaaactgaaagagttgaatgactggctaacaaaaacagaagaaagaacaaggaaaatggaggaagagcctcttggacctgatcttgaagacctaaaacgccaagtacaacaacataaggtgcttcaagaagatctagaacaagaacaagtcagggtcaattctctcactcacatggtggtggtagttgatgaatctagtggagatcacgcaactgctgctttggaagaacaacttaaggtattgggagatcgatgggcaaacatctgtagatggacagaagaccgctgggttcttttacaagacatccttctcaaatggcaacgtcttactgaagaacagtgcctttttagtgcatggctttcagaaaaagaagatgcagtgaacaagattcacacaactggctttaaagatcaaaatgaaatgttatcaagtcttcaaaaactggccgttttaaaagcggatctagaaaagaaaaagcaatccatgggcaaactgtattcactcaaacaagatcttctttcaacactgaagaataagtcagtgacccagaagacggaagcatggctggataactttgcccggtgttgggataatttagtccaaaaacttgaaaagagtacagcacagatttcacaggctgtcaccaccactcagccatcactaacacagacaactgtaatggaaacagtaactacggtgaccacaagggaacagatcctggtaaagcatgctcaagaggaacttccaccaccacctccccaaaagaagaggcagattactgtggattctgaaattaggaaaaggttggatgttgatataactgaacttcacagctggattactcgctcagaagctgtgttgcagagtcctgaatttgcaatctttcggaaggaaggcaacttctcagacttaaaagaaaaagtcaatgtaggttatgcattaatttttatatctgtactcattttgtgctgcttgtaaactccgtgctttgttatctgtgattctactagttgatagattaatgcgatatgataaaatgctgtttaatatgtcttaaaaatatattttagatagcaagcaaaatcaaagtttagcctagagaaatctttctggattcttctgtgactgactagggatgcctttcataaacttgccttaacttacatattatttaactataaattaacaattttatgacattaattcatgttgattcctttcatatattgttcagttacctcaaggctaggccttagcaagcttgcacaattgtgtagagtagaatagagtaaaatagaatagaataatataatagataccatacttaggactatgtctatattctcactgttatcaaaaagttattctttatagtcatcaatccctgtcatatattataagatatttaaatttcccagatatttgtgtattaccttatctaaaaggtgtccagcctttctcagtatttacatgtggtagcagatgctttgttgttgttattcccttctgagatggtataattttgaccttcacaaataggaagttttattaatttaatataaagtgtttcatctttagggaaattgtcaaggctttaatttttcaacttcaacaattataaaacatgcatctttgtatatgattggcaacagtttgtaaaataatttctaacaggcagagtaaataaaatgggcaagctaaggaagcagtgattatgaatgaaaagtaattttatccatgggaagatcacatctaaatgtgtatattagctctgctttttctctccaggattcaaatcatgaagttcaaaatccattgtatttttacaaatacgacattacctcagttacaagctaatgtttgctgttggggttggaacttttggagatcaacaaaagatatatatatattctggaaaaaaaatctattttttaggctgcttgaaaaagggaagacaattttgtcaccagttcttcttagagttaactacttataaattggaaagctattttaaattacttattagctttataagacatgctgttgtcagcattataatagactattctaaattgtttcaagaaatgggaaatatgaaaactgaaagataatatataattgtagaaaattagctaaatgtcttttttcaagtatacttctttgaaggtaaattgtttgctgtgatttttgagggaaattctcttagtagtagaaaattaattagagaacattaaactctaattttcaaacatcatgttacatatttgaccactgaaagtatgaatcacctttagcattttattagctaattaaaaatgattattgatctgattctcac

SEQ ID NO: 11166 - protein, 772 aa, Homo sapiens
MEDEREDVQKKTFTKWVNAQFSKFGKQHIENLFSDLQDGRRLLDLLEGLTGQKLPKEKGSTRVHALNNVNKALRVLQNNNVDLVNIGSTDIVDGNHKLTLGLIWNIILHWQVKNVMKNIMAGLQQTNSEKILLSWVRQSTRNYPQVNVINFTTSWSDGLALNALIHSHRPDLFDWNSVVCQQSATQRLEHAFNIARYQLGIEKLLDPEDVDTTYPDKKSILMYITSLFQVLPQQVSIEAIQEVEMLPRPPKVTKEEHFQLHHQMHYSQQITVSLAQGYERTSSPKPRFKSYAYTQAAYVTTSDPTRSPFPSQHLEAPEDKSFGSSLMESEVNLDRYQTALEEVLSWLLSAEDTLQAQGEISNDVEVVKDQFHTHEGYMMDLTAHQGRVGNILQLGSKLIGTGKLSEDEETEVQEQMNLLNSRWECLRVASMEKQSNLHRVLMDLQNQKLKELNDWLTKTEERTRKMEEEPLGPDLEDLKRQVQQHKVLQEDLEQEQVRVNSLTHMVVVVDESSGDHATAALEEQLKVLGDRWANICRWTEDRWVLLQDILLKWQRLTEEQCLFSAWLSEKEDAVNKIHTTGFKDQNEMLSSLQKLAVLKADLEKKKQSMGKLYSLKQDLLSTLKNKSVTQKTEAWLDNFARCWDNLVQKLEKSTAQISQAVTTTQPSLTQTTVMETVTTVTTREQILVKHAQEELPPPPPQKKRQITVDSEIRKRLDVDITELHSWITRSEAVLQSPEFAIFRKEGNFSDLKEKVNVGYALIFISVLILCCL

SEQ ID NO: 11167 - DNA, 636 bp, Homo sapiens
actttccccctacaggactcagatctgggaggcaattaccttcggagaaaaacgaataggaaaaactgaagtgttactttttttaaagctgctgaagtttgttggtttctcattgtttttaagcctactggagcaataaagtttgaagaacttttaccaggttttttttatcgctgccttgatatacacttttcaaaatgctttggtgggaagaagtagaggactgttatgaaagagaagatgttcaaaagaaaacattcacaaaatgggtaaatgcacaattttctaagtttgggaagcagcatattgagaacctcttcagtgacctacaggatgggaggcgcctcctagacctcctcgaaggcctgacagggcaaaaactgccaaaagaaaaaggatccacaagagttcatgccctgaacaatgtcaacaaggcactgcgggttttgcagaacaataatgttgatttagtgaatattggaagtactgacatcgtagatggaaatcataaactgactcttggtttgatttggaatataatcctccactggcaggtcaaaaatgtaatgaaaaatatcatggctggattgcaacaaaccaacagtgaaaagattctcctgagctgggtccgacaat

SEQ ID NO: 11168 - protein, 145 aa, Homo sapiens
MLWWEEVEDCYEREDVQKKTFTKWVNAQFSKFGKQHIENLFSDLQDGRRLLDLLEGLTGQKLPKEKGSTRVHALNNVNKALRVLQNNNVDLVNIGSTDIVDGNHKLTLGLIWNIILHWQVKNVMKNIMAGLQQTNSEKILLSWVR

SEQ ID NO: 11169 - DNA, 547 bp, Homo sapiens
aaagctgctgaagtttgttggtttctcattgtttttaagcctactggagcaataaagtttgaagaacttttaccaggttttttttatcgctgccttgatatacacttttcaaaatgctttggtgggaagaagtagaggactgttgaaaatggatgaagctggaaaccatcattctcatcagactaacacaggaacaggaaaacaaacaccgcatgttctcactcataagtgggagttgaacaatgagaacacatggacacagggaggagaacatcacacactggggcctgttggtgggtgaggggctatgggagggatagcattaggagaaatacctaatgtagatgatgagttgatgggtgcagcaagccaccatggcatgtgtatacctatgtaacaaacctgcatgttctgcacatgtatcccagaatttaaagtataataaaaaaaaaattgaggtctgcaacaggcaaagccactaaagaaactcagatatttttcattgtaatgttgaaaaagttatgaaatttcactaagcccgtgtcta

SEQ ID NO: 11170 - protein, 50 aa, Homo sapiens [sequence omitted]

SEQ ID NO: 11171 - DNA, 6756 bp, Homo sapiens
gccgccgggcggagagcccaagccgcgctgtcgccgcgcagggacgacttggccaacactcacacacactcacacacacccagcccgagcgggcgctcgcggcgaaccgtcaacatggcgctggggctcctgcccgagcgcgggcggcggcggcagcgcgggagctgctgagctcggccaagcccagtccagctgcgggagcccggaggatcgcacggggctgtcgccacctgcccggaggccccgagcccgccccgccccgcccccacccggcccagagcccacccctcggcggggccgaccccgagggcagccggctgccagcagacggcgagggagtcgagtgagcgcggcgccgcgagcgggctgcgggcagccggggaccgcaaactttgctgctcgccgcgcttctccggcccggctccttctccgctcgttaacgtcgccaaccccccccacccctcatatctctctccacccacccaaccgccccccgctccttctcgccgcctcgagtccgcttgggggaaaacttcaaagagccggatcgcaggctccctgcctactcccccaccggggatttcagactagacgcttgaagcaaagctgccatcccagaagacgacatgctctcagcaacccccctgtatgggaacgttcacagctggatgaacagcgagagggtccgcatgtgtggggcgagcgaagacaggaaaatccttgtaaatgatggtgacgcttcaaaagccagactggaactgagggaagagaatcccttgaaccacaacgtggtggatgcgagcacggcccataggatcgatggcctggcagcactgagcatggaccgcactggcctgatccgggaagggctgcgggtcccgggaaacatcgtctattctagcttgtgtggactgggctcagagaaaggtcgggaggctgccacaagcactctaggtggccttgggttttcttcggaaagaaatccagagatgcagttcaaaccgaatacacccgagacagtggaggcttctgccgtctctggaaaacccccaaatggcttcagtgctatatacaaaacaccgcctggaatacaaaaaagtgctgtagccacagcagaagcgctgggcttggacaggcctgccagcgacaaacagagccctctcaacatcaatggtgctagttatctgcggctgccctgggtcaatccttacatggagggtgccacgccagccatctaccctttcctcgactcgccaaataagtattcactgaacatgtacaaggccttgctacctcagcagtcctacagcttggcccagccgctgtattctccagtctgcaccaatggggagcgctttctctacctgccgccacctcactacgtcggtccccacatcccatcgtccttggcatcacccatgaggctctcgacaccttcggcctccccagccatcccgcctctcgtccattgcgcagacaaaagcctcccgtggaagatgggcgtcagccctgggaatcctgttgattcccacgcctatcctcacatccagaacagtaagcagcccagggttccctctgccaaggcggtcaccagtggcctgccgggggacacagctctcctgttgcccccctcgcctcggccgtcaccccgagtccaccttcccacccagcctgctgcagacacctactcggagttccacaagcactatgccaggatctccacctctccttcagttgccctgtcaaagccatacatgacagttagcagcgagttccccgcggccaggctctccaatggcaagtatcccaaggctccggaagggggcgaaggtgcccagccagtgcccgggcatgcccggaagacagcggttcaagacagaaaagatggcagctcacctcctctgttggagaagcagaccgttaccaaagacgtcacagataagccactagacttgtcttctaaagtggtggatgtagatgcttccaaagctgaccacatgaaaaagatggctcccacggtcctggttcacagcagggctggaagtggcttagtgctctccggaagtgagattccgaaagaaacactatctcctccaggaaatggttgtgctatctatagatctgaaatcatcagcactgctccctcatcctgggtggtgcccgggccaagtcctaacgaagagaacaatggcaaaagcatgtcgctgaaaaacaaggcattggactgggcgataccacagcagcggagttcatcatgcccgcgcatgggcggcaccgatgctgtcatcactaacgtttcagggtcagtgtcgagtgcaggccgcccagcctccgcatcacccgcccccaatgccaatgcagatggcaccaaaaccagcaggagctctgtagaaaccacaccatccgttattcagcacgtgggccagcccccggccactcctgccaagcacagtagcagcaccagcagcaagggcgccaaagccagcaacccagaaccgagtttcaaagcaaacgagaacggccttccaccaagctctatatttctgtctccaaatgaggcattcaggtccccaccaattccctaccccaggagttacctcccttacccagcccctgagggcattgctgtaagtcccctctccttacatggcaaaggacctgtctaccctcacccagttttgttacccaatggcagtctgtttcctgggcaccttgccccaaagcctgggctgccctatgggcttcccaccggccgtccagagtttgtgacctaccaagatgccctggggttgggcatggtgcatcccatgttgataccacacacgcccatagagattactaaagaggagaaaccagagaggagatcccggtcccatgagagagcccgttacgaggacccaaccctccggaatcggttttccgagattttggaaactagcagcaccaagttacatccagatgtccccaccgacaagaacctaaagccgaaccccaactggaatcaagggaagactgttgtcaaaagcgacaagcttgtctacgtagaccttctccgagaagaaccagatgctaaaactgacacaaacgtgtccaaacccagctttgcagcagagagtgttggccagagcgctgagccccccaagccctcagttgagccggccctgcagcagcaccgtgatttcatcgccctgagagaggagttggggcgcatcagtgacttccacgaaacttatactttcaaacagccagtcttcaccgtaagcaaggacagtgttctggcaggtaccaacaaagagaacctagggttgccagtctcgactccattcctggagccacctctggggagcgatggccctgctgtaacttttggtaaaacccaagaggatcccaaaccattttgtgtgggcagtgccccaccaagtgtggatgtgacccccacctataccaaagatggagctgatgaggctgaatcaaatgatggcaaagttctgaaaccgaagccatctaagctggcaaagagaatcgccaactcagcgggttacgtgggtgaccgattcaaatgtgtcactaccgaactgtatgcagattccagtcagctcagccgggagcaacgggcattgcagatggaaggattacaagaggacagtattttatgtctacccgctgcttactgtgagcgtgcaatgatgcgcttctcagagttggagatgaaagaaagagaaggtggccacccagcaaccaaagactccgagatgtgcaaattcagcccagccgactgggaaaggttgaaaggaaatcaggacaaaaagccaaagtcggtcaccctggaggaggccattgcagaacagaacgaaagtgagagatgcgagtatagtgttggaaacaagcaccgtgatccctttgaagccccagaggacaaagatcttcctgtggagaagtactttgtggagaggcagcctgtgagcgagcctcccgcagaccaggtggcctcggacatgcctcacagccccaccctccgggtggacaggaaacgcaaagtctcaggtgacagcagccacactgagaccactgcggaggaggtgccagaggaccctctgctgaaagccaaacgccgacgagtctctaaagatgactggcctgagagggaaatgacaaacagttcctctaaccacttagaagacccacattatagtgagctgaccaacctgaaggtgtgcattgaattaacagggctccatcctaaaaaacaacgccacttgctgcaccttagagaacgatgggagcagcaggtgtcggcagcagatggcaaacctggccggcaaagcaggaaggaagtgacccaggccactcagcctgaggccattcctcaggggactaacatcactgaagagaaacctggcaggaaaagggcagaggccaaaggcaacagaagctggtcggaagagtctcttaaacccagtgacaatgaacaaggcttgcctgtgttctccggctctccgcccatgaagagtctttcatccaccagtgcaggcggcaaaaagcaggctcagccaagctgcgcaccagcctccaggccgcctgccaaacagcagaaaattaaagaaaaccagaagacagatgtgctgtgtgcagacgaagaagaggattgccaggctgcctccctgctgcagaaatacaccgacaacagcgagaagccatccgggaagagactgtgcaaaaccaaacacttgatccctcaggagtccaggcggggattgccactgacaggggaatactacgtggagaatgccgatggcaaggtgactgtccggagattcagaaagcggccggagcccagttcggactatgatctgtcaccagccaagcaggagccaaagcccttcgaccgcttgcagcaactgctaccagcctcccagtccacacagctgccatgctcaagttcccctcaggagaccacccagtctcgccctatgccgccggaagcacggagacttattgtcaataagaacgctggcgagacccttctgcagcgggcagccaggcttggctatgaggaagtggtcctgtactgcttagagaacaagatttgtgatgtaaatcatcgggacaacgcaggttactgcgccctgcatgaagcttgtgctaggggctggctcaacattgtgcgacacctccttgaatatggcgctgatgtcaactgtagtgcccaggatggaaccaggcctctgcacgatgctgttgagaacgatcacttggaaattgtccgactacttctctcttatggtgctgaccccaccttggctacgtactcaggtagaaccatcatgaaaatgacccacagtgaacttatggaaaagttcttaacagattatttaaatgacctccagggtcgcaatgatgatgacgccagtggcacttgggacttctatggcagctctgtttgtgaaccagatgatgaaagtggctatgatgttttagccaaccccccaggaccagaagaccaggatgatgatgacgatgcctatagcgatgtgtttgaatttgaattttcagagacccccctcttaccgtgttataacatccaagtatctgtggctcaggggccacgaaactggctactgctttcggatgtccttaagaaattgaaaatgtcctcccgcatatttcgctgcaattttccaaacgtggaaattgtcaccattgcagaggcagaattttatcggcaggtttctgcaagtctcttgttctcttgctccaaagacctggaagccttcaaccctgaaagtaaggagctgttagatctggtggaattcacgaacgaaattcagactctgctgggctcctctgtagagtggctccaccccagtgatctggcctcagacaactactggtgagcaagctggacccaccatgtacagtgtgttatagtgttaatccttgtgcatatgtgtcataatacaactatttctgtaaagaaaggacactattacatatgaaaatatctcttctttatataagagaaattactccagtcagaaggacttagaaacatgtttttttccttttaaacttttaagtcagtttttatgaagttgttataatgtttctttacttttcaatgcacacatgctttgggatacgtttgtttttacttggaacatttgtttcttttcttttttaaggagaaaaaaaaatgagtaaaaggagctccacactttgacttaatttcatacaaagctctgatgacaggccatgactgtagagtggtcagaactgtgtggttggtttgagggagcgaattcggggaaggcacttggtgatataactttgttttgtttacagagtacctgctcgggccaggtaaatgctattggatgtaatccagtagtgtgtaatataaattcaaaccatatccacacacaacaactaattgtatgaaacttttatatcctaatttaaaagctgtgaaattagttttcacgcatcaaaccggattgtttatatgtttaaacattttatgctcttatttaaagaagactttgagctatttttttctgtaccctgtaaaatattgaaaactaacataatatgttgaggttgcttggaaatgtacataaaactaaaattttctgaatcgtgtgtttatgtttgaaatctgtgttttaactttgtaagtaaattctctgcctttgtatttatattttacaaaaattttcttaaaaggcaataaaactgttgaggaaaggagaaaattga

SEQ ID NO: 11172 - protein, 1755 aa, Homo sapiens
MLSATPLYGNVHSWMNSERVRMCGASEDRKILVNDGDASKARLELREENPLNHNVVDASTAHRIDGLAALSMDRTGLIREGLRVPGNIVYSSLCGLGSEKGREAATSTLGGLGFSSERNPEMQFKPNTPETVEASAVSGKPPNGFSAIYKTPPGIQKSAVATAEALGLDRPASDKQSPLNINGASYLRLPWVNPYMEGATPAIYPFLDSPNKYSLNMYKALLPQQSYSLAQPLYSPVCTNGERFLYLPPPHYVGPHIPSSLASPMRLSTPSASPAIPPLVHCADKSLPWKMGVSPGNPVDSHAYPHIQNSKQPRVPSAKAVTSGLPGDTALLLPPSPRPSPRVHLPTQPAADTYSEFHKHYARISTSPSVALSKPYMTVSSEFPAARLSNGKYPKAPEGGEGAQPVPGHARKTAVQDRKDGSSPPLLEKQTVTKDVTDKPLDLSSKVVDVDASKADHMKKMAPTVLVHSRAGSGLVLSGSEIPKETLSPPGNGCAIYRSEIISTAPSSWVVPGPSPNEENNGKSMSLKNKALDWAIPQQRSSSCPRMGGTDAVITNVSGSVSSAGRPASASPAPNANADGTKTSRSSVETTPSVIQHVGQPPATPAKHSSSTSSKGAKASNPEPSFKANENGLPPSSIFLSPNEAFRSPPIPYPRSYLPYPAPEGIAVSPLSLHGKGPVYPHPVLLPNGSLFPGHLAPKPGLPYGLPTGRPEFVTYQDALGLGMVHPMLIPHTPIEITKEEKPERRSRSHERARYEDPTLRNRFSEILETSSTKLHPDVPTDKNLKPNPNWNQGKTVVKSDKLVYVDLLREEPDAKTDTNVSKPSFAAESVGQSAEPPKPSVEPALQQHRDFIALREELGRISDFHETYTFKQPVFTVSKDSVLAGTNKENLGLPVSTPFLEPPLGSDGPAVTFGKTQEDPKPFCVGSAPPSVDVTPTYTKDGADEAESNDGKVLKPKPSKLAKRIANSAGYVGDRFKCVTTELYADSSQLSREQRALQMEGLQEDSILCLPAAYCERAMMRFSELEMKEREGGHPATKDSEMCKFSPADWERLKGNQDKKPKSVTLEEAIAEQNESERCEYSVGNKHRDPFEAPEDKDLPVEKYFVERQPVSEPPADQVASDMPHSPTLRVDRKRKVSGDSSHTETTAEEVPEDPLLKAKRRRVSKDDWPEREMTNSSSNHLEDPHYSELTNLKVCIELTGLHPKKQRHLLHLRERWEQQVSAADGKPGRQSRKEVTQATQPEAIPQGTNITEEKPGRKRAEAKGNRSWSEESLKPSDNEQGLPVFSGSPPMKSLSSTSAGGKKQAQPSCAPASRPPAKQQKIKENQKTDVLCADEEEDCQAASLLQKYTDNSEKPSGKRLCKTKHLIPQESRRGLPLTGEYYVENADGKVTVRRFRKRPEPSSDYDLSPAKQEPKPFDRLQQLLPASQSTQLPCSSSPQETTQSRPMPPEARRLIVNKNAGETLLQRAARLGYEEVVLYCLENKICDVNHRDNAGYCALHEACARGWLNIVRHLLEYGADVNCSAQDGTRPLHDAVENDHLEIVRLLLSYGADPTLATYSGRTIMKMTHSELMEKFLTDYLNDLQGRNDDDASGTWDFYGSSVCEPDDESGYDVLANPPGPEDQDDDDDAYSDVFEFEFSETPLLPCYNIQVSVAQGPRNWLLLSDVLKKLKMSSRIFRCNFPNVEIVTIAEAEFYRQVSASLLFSCSKDLEAFNPESKELLDLVEFTNEIQTLLGSSVEWLHPSDLASDNYW

SEQ ID NO: 11173 - DNA, 6654 bp, Homo sapiens
gccgccgggcggagagcccaagccgcgctgtcgccgcgcagggacgacttggccaacactcacacacactcacacacacccagcccgagcgggcgctcgcggcgaaccgtcaacatggcgctggggctcctgcccgagcgcgggcggcggcggcagcgcgggagctgctgagctcggccaagcccagtccagctgcgggagcccggaggatcgcacggggctgtcgccacctgcccggaggccccgagcccgccccgccccgcccccacccggcccagagcccacccctcggcggggccgaccccgagggcagccggctgccagcagacggcgagggagtcgagtgagcgcggcgccgcgagcgggctgcgggcagccggggaccgcaaactttgctgctcgccgcgcttctccggcccggctccttctccgctcgttaacgtcgccaaccccccccacccctcatatctctctccacccacccaaccgccccccgctccttctcgccgcctcgagtccgcttgggggaaaacttcaaagagccggatcgcaggctccctgcctactcccccaccggggatttcagactagacgcttgaagcaaagctgccatcccagaagacgacatgctctcagcaacccccctgtatgggaacgttcacagctggatgaacagcgagagggtccgcatgtgtggggcgagcgaagacaggaaaatccttgtaaatgatggtgacgcttcaaaagccagactggaactgagggaagagaatcccttgaaccacaacgtggtggatgcgagcacggcccataggatcgatggcctggcagcactgagcatggaccgcactggcctgatccgggaagggctgcgggtcccgggaaacatcgtctattctagcttgtgtggactgggctcagagaaaggtcgggaggctgccacaagcactctaggtggccttgggttttcttcggaaagaaatccagagatgcagttcaaaccgaatacacccgagacagtggaggcttctgccgtctctggaaaacccccaaatggcttcagtgctatatacaaaacaccgcctggaatacaaaaaagtgctgtagccacagcagaagcgctgggcttggacaggcctgccagcgacaaacagagccctctcaacatcaatggtgctagttatctgcggctgccctgggtcaatccttacatggagggtgccacgccagccatctaccctttcctcgactcgccaaataagtattcactgaacatgtacaaggccttgctacctcagcagtcctacagcttggcccagccgctgtattctccagtctgcaccaatggggagcgctttctctacctgccgccacctcactacgtcggtccccacatcccatcgtccttggcatcacccatgaggctctcgacaccttcggcctccccagccatcccgcctctcgtccattgcgcagacaaaagcctcccgtggaagatgggcgtcagccctgggaatcctgttgattcccacgcctatcctcacatccagaacagtaagcagcccagggttccctctgccaaggcggtcaccagtggcctgccgggggacacagctctcctgttgcccccctcgcctcggccgtcaccccgagtccaccttcccacccagcctgctgcagacacctactcggagttccacaagcactatgccaggatctccacctctccttcagttgccctgtcaaagccatacatgacagttagcagcgagttccccgcggccaggctctccaatggcaagtatcccaaggctccggaagggggcgaaggtgcccagccagtgcccgggcatgcccggaagacagcggttcaagacagaaaagatggcagctcacctcctctgttggagaagcagaccgttaccaaagacgtcacagataagccactagacttgtcttctaaagtggtggatgtagatgcttccaaagctgaccacatgaaaaagatggctcccacggtcctggttcacagcagggctggaagtggcttagtgctctccggaagtgagattccgaaagaaacactatctcctccaggaaatggttgtgctatctatagatctgaaatcatcagcactgctccctcatcctgggtggtgcccgggccaagtcctaacgaagagaacaatggcaaaagcatgtcgctgaaaaacaaggcattggactgggcgataccacagcagcggagttcatcatgcccgcgcatgggcggcaccgatgctgtcatcactaacgtttcagggtcagtgtcgagtgcaggccgcccagcctccgcatcacccgcccccaatgccaatgcagatggcaccaaaaccagcaggagctctgtagaaaccacaccatccgttattcagcacgtgggccagcccccggccactcctgccaagcacagtagcagcaccagcagcaagggcgccaaagccagcaacccagaaccgagtttcaaagcaaacgagaacggccttccaccaagctctatatttctgtctccaaatgaggcattcaggtccccaccaattccctaccccaggagttacctcccttacccagcccctgagggcattgctgtaagtcccctctccttacatggcaaaggacctgtctaccctcacccagttttgttacccaatggcagtctgtttcctgggcaccttgccccaaagcctgggctgccctatgggcttcccaccggccgtccagagtttgtgacctaccaagatgccctggggttgggcatggtgcatcccatgttgataccacacacgcccatagagattactaaagaggagaaaccagagaggagatcccggtcccatgagagagcccgttacgaggacccaaccctccggaatcggttttccgagattttggaaactagcagcaccaagttacatccagatgtccccaccgacaagaacctaaagccgaaccccaactggaatcaagggaagactgttgtcaaaagcgacaagcttgtctacgtagaccttctccgagaagaaccagatgctaaaactgacacaaacgtgtccaaacccagctttgcagcagagagtgttggccagagcgctgagccccccaagccctcagttgagccggccctgcagcagcaccgtgatttcatcgccctgagagaggagttggggcgcatcagtgacttccacgaaacttatactttcaaacagccagtcttcaccgtaagcaaggacagtgttctggcaggtaccaacaaagagaacctagggttgccagtctcgactccattcctggagccacctctggggagcgatggccctgctgtaacttttggtaaaacccaagaggatcccaaaccattttgtgtgggcagtgccccaccaagtgtggatgtgacccccacctataccaaagatggagctgatgaggctgaatcaaatgatggcaaagttctgaaaccgaagccatctaagctggcaaagagaatcgccaactcagcgggttacgtgggtgaccgattcaaatgtgtcactaccgaactgtatgcagattccagtcagctcagccgggagcaacgggcattgcagatggaaggattacaagaggacagtattttatgtctacccgctgcttactgtgagcgtgcaatgatgcgcttctcagagttggagatgaaagaaagagaaggtggccacccagcaaccaaagactccgagatgtgcaaattcagcccagccgactgggaaaggttgaaaggaaatcaggacaaaaagccaaagtcggtcaccctggaggaggccattgcagaacagaacgaaagtgagagatgcgagtatagtgttggaaacaagcaccgtgatccctttgaagccccagaggacaaagatcttcctgtggagaagtactttgtggagaggcagcctgtgagcgagcctcccgcagaccaggtggcctcggacatgcctcacagccccaccctccgggtggacaggaaacgcaaagtctcaggtgacagcagccacactgagaccactgcggaggaggtgccagaggaccctctgctgaaagccaaacgccgacgagtctctaaagggctccatcctaaaaaacaacgccacttgctgcaccttagagaacgatgggagcagcaggtgtcggcagcagatggcaaacctggccggcaaagcaggaaggaagtgacccaggccactcagcctgaggccattcctcaggggactaacatcactgaagagaaacctggcaggaaaagggcagaggccaaaggcaacagaagctggtcggaagagtctcttaaacccagtgacaatgaacaaggcttgcctgtgttctccggctctccgcccatgaagagtctttcatccaccagtgcaggcggcaaaaagcaggctcagccaagctgcgcaccagcctccaggccgcctgccaaacagcagaaaattaaagaaaaccagaagacagatgtgctgtgtgcagacgaagaagaggattgccaggctgcctccctgctgcagaaatacaccgacaacagcgagaagccatccgggaagagactgtgcaaaaccaaacacttgatccctcaggagtccaggcggggattgccactgacaggggaatactacgtggagaatgccgatggcaaggtgactgtccggagattcagaaagcggccggagcccagttcggactatgatctgtcaccagccaagcaggagccaaagcccttcgaccgcttgcagcaactgctaccagcctcccagtccacacagctgccatgctcaagttcccctcaggagaccacccagtctcgccctatgccgccggaagcacggagacttattgtcaataagaacgctggcgagacccttctgcagcgggcagccaggcttggctatgaggaagtggtcctgtactgcttagagaacaagatttgtgatgtaaatcatcgggacaacgcaggttactgcgccctgcatgaagcttgtgctaggggctggctcaacattgtgcgacacctccttgaatatggcgctgatgtcaactgtagtgcccaggatggaaccaggcctctgcacgatgctgttgagaacgatcacttggaaattgtccgactacttctctcttatggtgctgaccccaccttggctacgtactcaggtagaaccatcatgaaaatgacccacagtgaacttatggaaaagttcttaacagattatttaaatgacctccagggtcgcaatgatgatgacgccagtggcacttgggacttctatggcagctctgtttgtgaaccagatgatgaaagtggctatgatgttttagccaaccccccaggaccagaagaccaggatgatgatgacgatgcctatagcgatgtgtttgaatttgaattttcagagacccccctcttaccgtgttataacatccaagtatctgtggctcaggggccacgaaactggctactgctttcggatgtccttaagaaattgaaaatgtcctcccgcatatttcgctgcaattttccaaacgtggaaattgtcaccattgcagaggcagaattttatcggcaggtttctgcaagtctcttgttctcttgctccaaagacctggaagccttcaaccctgaaagtaaggagctgttagatctggtggaattcacgaacgaaattcagactctgctgggctcctctgtagagtggctccaccccagtgatctggcctcagacaactactggtgagcaagctggacccaccatgtacagtgtgttatagtgttaatccttgtgcatatgtgtcataatacaactatttctgtaaagaaaggacactattacatatgaaaatatctcttctttatataagagaaattactccagtcagaaggacttagaaacatgtttttttccttttaaacttttaagtcagtttttatgaagttgttataatgtttctttacttttcaatgcacacatgctttgggatacgtttgtttttacttggaacatttgtttcttttcttttttaaggagaaaaaaaaatgagtaaaaggagctccacactttgacttaatttcatacaaagctctgatgacaggccatgactgtagagtggtcagaactgtgtggttggtttgagggagcgaattcggggaaggcacttggtgatataactttgttttgtttacagagtacctgctcgggccaggtaaatgctattggatgtaatccagtagtgtgtaatataaattcaaaccatatccacacacaacaactaattgtatgaaacttttatatcctaatttaaaagctgtgaaattagttttcacgcatcaaaccggattgtttatatgtttaaacattttatgctcttatttaaagaagactttgagctatttttttctgtaccctgtaaaatattgaaaactaacataatatgttgaggttgcttggaaatgtacataaaactaaaattttctgaatcgtgtgtttatgtttgaaatctgtgttttaactttgtaagtaaattctctgcctttgtatttatattttacaaaaattttcttaaaaggcaataaaactgttgaggaaaggagaaaattga

SEQ ID NO: 11174 - protein, 1721 aa, Homo sapiens; identical to SEQ ID NO: 1771

SEQ ID NO: 11175 - DNA, 6537 bp, Homo sapiens
gccgccgggcggagagcccaagccgcgctgtcgccgcgcagggacgacttggccaacactcacacacactcacacacacccagcccgagcgggcgctcgcggcgaaccgtcaacatggcgctggggctcctgcccgagcgcgggcggcggcggcagcgcgggagctgctgagctcggccaagcccagtccagctgcgggagcccggaggatcgcacggggctgtcgccacctgcccggaggccccgagcccgccccgccccgcccccacccggcccagagcccacccctcggcggggccgaccccgagggcagccggctgccagcagacggcgagggagtcgagtgagcgcggcgccgcgagcgggctgcgggcagccggggaccgcaaactttgctgctcgccgcgcttctccggcccggctccttctccgctcgttaacgtcgccaaccccccccacccctcatatctctctccacccacccaaccgccccccgctccttctcgccgcctcgagtccgcttgggggaaaacttcaaagagccggatcgcaggctccctgcctactcccccaccggggatttcagactagacgcttgaagcaaagctgccatcccagaagacgacatgctctcagcaacccccctgtatgggaacgttcacagctggatgaacagcgagagggtccgcatgtgtggggcgagcgaagacaggaaaatccttgtaaatgatggtgacgcttcaaaagccagactggaactgagggaagagaatcccttgaaccacaacgtggtggatgcgagcacggcccataggatcgatggcctggcagcactgagcatggaccgcactggcctgatccgggaagggctgcgggtcccgggaaacatcgtctattctagcttgtgtggactgggctcagagaaaggtcgggaggctgccacaagcactctaggtggccttgggttttcttcggaaagaaatccagagatgcagttcaaaccgaatacacccgagacagtggaggcttctgccgtctctggaaaacccccaaatggcttcagtgctatatacaaaacaccgcctggaatacaaaaaagtgctgtagccacagcagaagcgctgggcttggacaggcctgccagcgacaaacagagccctctcaacatcaatggtgctagttatctgcggctgccctgggtcaatccttacatggagggtgccacgccagccatctaccctttcctcgactcgccaaataagtattcactgaacatgtacaaggccttgctacctcagcagtcctacagcttggcccagccgctgtattctccagtctgcaccaatggggagcgctttctctacctgccgccacctcactacgtcggtccccacatcccatcgtccttggcatcacccatgaggctctcgacaccttcggcctccccagccatcccgcctctcgtccattgcgcagacaaaagcctcccgtggaagatgggcgtcagccctgggaatcctgttgattcccacgcctatcctcacatccagaacagtaagcagcccagggttccctctgccaaggcggtcaccagtggcctgccgggggacacagctctcctgttgcccccctcgcctcggccgtcaccccgagtccaccttcccacccagcctgctgcagacacctactcggagttccacaagcactatgccaggatctccacctctccttcagttgccctgtcaaagccatacatgacagttagcagcgagttccccgcggccaggctctccaatggcaagtatcccaaggctccggaagggggcgaaggtgcccagccagtgcccgggcatgcccggaagacagcggttcaagacagaaaagatggcagctcacctcctctgttggagaagcagaccgttaccaaagacgtcacagataagccactagacttgtcttctaaagtggtggatgtagatgcttccaaagctgaccacatgaaaaagatggctcccacggtcctggttcacagcagggctggaagtggcttagtgctctccggaagtgagattccgaaagaaacactatctcctccaggaaatggttgtgctatctatagatctgaaatcatcagcactgctccctcatcctgggtggtgcccgggccaagtcctaacgaagagaacaatggcaaaagcatgtcgctgaaaaacaaggcattggactgggcgataccacagcagcggagttcatcatgcccgcgcatgggcggcaccgatgctgtcatcactaacgtttcagggtcagtgtcgagtgcaggccgcccagcctccgcatcacccgcccccaatgccaatgcagatggcaccaaaaccagcaggagctctgtagaaaccacaccatccgttattcagcacgtgggccagcccccggccactcctgccaagcacagtagcagcaccagcagcaagggcgccaaagccagcaacccagaaccgagtttcaaagcaaacgagaacggccttccaccaagctctatatttctgtctccaaatgaggcattcaggtccccaccaattccctaccccaggagttacctcccttacccagcccctgagggcattgctgtaagtcccctctccttacatggcaaaggacctgtctaccctcacccagttttgttacccaatggcagtctgtttcctgggcaccttgccccaaagcctgggctgccctatgggcttcccaccggccgtccagagtttgtgacctaccaagatgccctggggttgggcatggtgcatcccatgttgataccacacacgcccatagagattactaaagaggagaaaccagagaggagatcccggtcccatgagagagcccgttacgaggacccaaccctccggaatcggttttccgagattttggaaactagcagcaccaagttacatccagatgtccccaccgacaagaacctaaagccgaaccccaactggaatcaagggaagactgttgtcaaaagcgacaagcttgtctacgtagaccttctccgagaagaaccagatgctaaaactgacacaaacgtgtccaaacccagctttgcagcagagagtgttggccagagcgctgagccccccaagccctcagttgagccggccctgcagcagcaccgtgatttcatcgccctgagagaggagttggggcgcatcagtgacttccacgaaacttatactttcaaacagccagtcttcaccgtaagcaaggacagtgttctggcaggtaccaacaaagagaacctagggttgccagtctcgactccattcctggagccacctctggggagcgatggccctgctgtaacttttggtaaaacccaagaggatcccaaaccattttgtgtgggcagtgccccaccaagtgtggatgtgacccccacctataccaaagatggagctgatgaggctgaatcaaatgatggcaaagttctgaaaccgaagccatctaagctggcaaagagaatcgccaactcagcgggttacgtgggtgaccgattcaaatgtgtcactaccgaactgtatgcagattccagtcagctcagccgggagcaacgggcattgcagatggaaggattacaagaggacagtattttatgtctacccgctgcttactgtgagcgtgcaatgatgcgcttctcagagttggagatgaaagaaagagaaggtggccacccagcaaccaaagactccgagatgtgcaaattcagcccagccgactgggaaaggttgaaaggaaatcaggacaaaaagccaaagtcggtcaccctggaggaggccattgcagaacagaacgaaagtgagagatgcgagtatagtgttggaaacaagcaccgtgatccctttgaagccccagaggacaaagatcttcctgtggagaagtactttgtggagaggcagcctgtgagcgagcctcccgcagaccaggtggcctcggacatgcctcacagccccaccctccgggtggacaggaaacgcaaagtctcaggtgacagcagccacactgagaccactgcggaggaggtgccagaggaccctctgctgaaagccaaacgccgacgagtctctaaagggctccatcctaaaaaacaacgccacttgctgcaccttagagaacgatgggagcagcaggtgtcggcagcagatggcaaacctggccggcaaagcaggaaggaagtgacccaggccactcagcctgaggccattcctcaggggactaacatcactgaagagaaacctggcaggaaaagggcagaggccaaaggcaacagaagctggtcggaagagtctcttaaacccagtgacaatgaacaaggcttgcctgtgttctccggctctccgcccatgaagagtctttcatccaccagtgcaggcggcaaaaagcaggctcagccaagctgcgcaccagcctccaggccgcctgccaaacagcagaaaattaaagaaaaccagaagacagatgtgctgtgtgcagacgaagaagaggattgccaggctgcctccctgctgcagaaatacaccgacaacagcgagaagccatccgggaagagactgtgcaaaaccaaacacttgatccctcaggagtccaggcggggattgccactgacaggggaatactacgtggagaatgccgatggcaaggtgactgtccggagattcagaaagcggccggagcccagttcggactatgatctgtcaccagccaagcaggagccaaagcccttcgaccgcttgcagcaactgctaccagcctcccagtccacacagctgccatgctcaagttcccctcaggagaccacccagtctcgccctatgccgccggaagcacggagacttattgtcaataagaacgctggcgagacccttctgcagcgggcagccaggcttggctatgaggaagtggtcctgtactgcttagagaacaagatttgtgatgtaaatcatcgggacaacgcaggttactgcgccctgcatgaagcttgtgctaggggctggctcaacattgtgcgacacctccttgaatatggcgctgatgtcaactgtagtgcccaggatggaaccaggcctctgcacgatgctgttgagaacgatcacttggaaattgtccgactacttctctcttatggtgctgaccccaccttggctacgtactcaggtagaaccatcatgaaaatgacccacagtgaacttatggaaaagttcttaacagattatttaaatgacctccagggtcgcaatgatgatgacgccagtggcacttgggacttctatggcagctctgtttgtgaaccagatgatgaaagtggctatgatgttttagccaaccccccaggaccagaagaccaggatgatgatgacgatgcctatagcgatgtgtttgaatttgaattttcagagacccccctcttaccgtgttataacatccaagtatctgtggctcaggggccacgaaactggctactgctttcggatgtccttaagaaattgaaaatgtcctcccgcatatttcgctgcaattttccaaacgtggaaattgtcaccattgcagaggcagaattttatcggcaggtttctgcaagtctcttgttctcttgctccaaagacctggaagccttcaaccctgaaagtaaggagctgttagatctggtggaattcacgaacgaaattcagactctgctgggctcctctgtagagtggctccaccccagtgatctggcctcagacaactactggtgagcaagctggacccaccatgtacagtgtgttatagtgttaatccttgtgcatatgtgtcataatacaactatttctgtaaagaaaggacactattacatatgaaaatatctcttctttatataagagaaattactccagtcagaaggacttagaaacatgtttttttccttttaaacttttaagtcagtttttatgaagttgttataatgtttctttacttttcaatgcacacatgctttgggatacgtttgtttttacttggaacatttgtttcttttcttttttaaggagaaaaaaaaatgagtaaaaggagctccacactttgacttaatttcatacaaagctctgatgacaggccatgactgtagagtggtcagaactgtgtggttggtttgagggagcgaattcggggaaggcacttggtgatataactttgttttgtttacagagtacctgctcgggccaggtaaatgctattggatgtaatccagtagtgtgtaatataaattcaaaccatatccacacacaacaactaattgtatgaaacttttatatcctaatttaaaagctgtgaaattagttttcacgcatcaaaccggattgtttatatgtttaaacattttatgctcttatttaaagaagactttgagctatttttttctgtaccctgtaaaatattgaaaactaacataatatgttgaggttgcttggaaatgtacataaaactaaaattttctgaatcgtg

SEQ ID NO: 11176 - protein, 1721 aa, Homo sapiens; identical to SEQ ID NO: 1771

SEQ ID NO: 11177 - DNA, 2589 bp, Homo sapiens
aaaaacccccagccgccgccaccgccgcctcgtctcgcctctccgggggccggtcgttcctccaagtggaacgtcggcgtgtgcgtgcgcgagggtgtgtggcgagtgcctcgggccgagccgagctcgacctgccgccgctgccgcgcaactcgggaggggagtcccgttttttcttggcttgccccaaagcacgaatcacgtggattaaaaaaaaaaactactaagaaatcgagcagagcaagggcggcaccgatgctgtcatcactaacgtttcagggtcagtgtcgagtgcaggccgcccagcctccgcatcacccgcccccaatgccaatgcagatggcaccaaaaccagcaggagctctgtagaaaccacaccatccgttattcagcacgtgggccagcccccggccactcctgccaagcacagtagcagcaccagcagcaagggcgccaaagccagcaacccagaaccgagtttcaaagcaaacgagaacggccttccaccaagctctatatttctgtctccaaatgaggcattcaggtccccaccaattccctaccccaggagttacctcccttacccagcccctgagggcattgctgtaagtcccctctccttacatggcaaaggacctgtctaccctcacccagttttgttacccaatggcagtctgtttcctgggcaccttgccccaaagcctgggctgccctatgggcttcccaccggccgtccagagtttgtgacctaccaagatgccctggggttgggcatggtgcatcccatgttgataccacacacgcccatagagattactaaagaggagaaaccagagaggagatcccggtcccatgagagagcccgttacgaggacccaaccctccggaatcggttttccgagattttggaaactagcagcaccaagttacatccagatgtccccaccgacaagaacctaaagccgaaccccaactggaatcaagggaagactgttgtcaaaagcgacaagcttgtctacgtagaccttctccgagaagaaccagatgctaaaactgacacaaacgtgtccaaacccagctttgcagcagagagtgttggccagagcgctgagccccccaagccctcagttgagccggccctgcagcagcaccgtgatttcatcgccctgagagaggagttggggcgcatcagtgacttccacgaaacttatactttcaaacagccagtcttcaccgtaagcaaggacagtgttctggcaggtaccaacaaagagaacctagggttgccagtctcgactccattcctggagccacctctggggagcgatggccctgctgtaacttttggtaaaacccaagaggatcccaaaccattttgtgtgggcagtgccccaccaagtgtggatgtgacccccacctataccaaagatggagctgatgaggctgaatcaaatgatggcaaagttctgaaaccgaagccatctaagctggcaaagagaatcgccaactcagcgggttacgtgggtgaccgattcaaatgtgtcactaccgaactgtatgcagattccagtcagctcagccgggagcaacgggcattgcaggtgagcccccccacctgaatttcagttactttaccagttgtcagttttttaatgtgtaaacaggattgggggagtatggtagggcagggcaccaggcagatttggtgaatgaagcttgtggtaatttgaatatatgcaatgtggccagtaagagaacgtgagtggtagcactgaggcgtgtctggatgctttaagttattctgtagattataagggaactccactcaattgctgataaccgatgttttaattattgtgaagggtatctaaagactgcatgacgtttacctatcaattgctttgatttctctgcctgtaagatagcaaatatacctagaagtgctgcttagaatgccttacttgatacctggtagagatgtgtagcagccgcatgtctgtgggattcatgcaaatttttcaccaaaaagaaaggaaaaaaaaaagaaaaaaggttgcttaaagggatagagtatgtatttaacttgctagtgaattatgatagatgttgtataggaatttccttaagatattttacttttaattaaaagatgaataaagccaaattgttttgcaatgttaagaaaaaaattggtttatgcttataaaaatggatgaagttatctaaatgatccattgagtgcccattttaattacatagatggaaggattacaagaggacagtattttatgtctacccgctgcttactgtgaggtcagttcttcaaatttttattactagaatcttacataaaccttttgagttaaatttcatttccaaatatacaaagggaagtttgtgggccatggtcgtctttattcattgtgtattttgtttcttttctgttgtgtttttgttttgttttctttgcgttgtgttttcgttttgttttatttaccttcaaaagagaatgtctgtctgtatgcaatagtgtatgtgtggatatacatacacatcgcatatatatctatatacacatgactttatgaa

SEQ ID NO: 11178 - protein, 281 aa, Homo sapiens
MVHPMLIPHTPIEITKEEKPERRSRSHERARYEDPTLRNRFSEILETSSTKLHPDVPTDKNLKPNPNWNQGKTVVKSDKLVYVDLLREEPDAKTDTNVSKPSFAAESVGQSAEPPKPSVEPALQQHRDFIALREELGRISDFHETYTFKQPVFTVSKDSVLAGTNKENLGLPVSTPFLEPPLGSDGPAVTFGKTQEDPKPFCVGSAPPSVDVTPTYTKDGADEAESNDGKVLKPKPSKLAKRIANSAGYVGDRFKCVTTELYADSSQLSREQRALQVSPPT

SEQ ID NO: 11179 - DNA, 4611 bp, Homo sapiens
gccgccgggcggagagcccaagccgcgctgtcgccgcgcagggacgacttggccaacactcacacacactcacacacacccagcccgagcgggcgctcgcggcgaaccgtcaacatggcgctggggctcctgcccgagcgcgggcggcggcggcagcgcgggagctgctgagctcggccaagcccagtccagctgcgggagcccggaggatcgcacggggctgtcgccacctgcccggaggccccgagcccgccccgccccgcccccacccggcccagagcccacccctcggcggggccgaccccgagggcagccggctgccagcagacggcgagggagtcgagtgagcgcggcgccgcgagcgggctgcgggcagccggggaccgcaaactttgctgctcgccgcgcttctccggcccggctccttctccgctcgttaacgtcgccaaccccccccacccctcatatctctctccacccacccaaccgccccccgctccttctcgccgcctcgagtccgcttgggggaaaacttcaaagagccggatcgcaggctccctgcctactcccccaccggggatttcagactagacgcttgaagcaaagctgccatcccagaagacgacatgctctcagcaacccccctgtatgggaacgttcacagctggatgaacagcgagagggtccgcatgtgtggggcgagcgaagacaggaaaatccttgtaaatgatggtgacgcttcaaaagccagactggaactgagggaagagaatcccttgaaccacaacgtggtggatgcgagcacggcccataggatcgatggcctggcagcactgagcatggaccgcactggcctgatccgggaagggctgcgggtcccgggaaacatcgtctattctagcttgtgtggactgggctcagagaaaggtcgggaggctgccacaagcactctaggtggccttgggttttcttcggaaagaaatccagagatgcagttcaaaccgaatacacccgagacagtggaggcttctgccgtctctggaaaacccccaaatggcttcagtgctatatacaaaacaccgcctggaatacaaaaaagtgctgtagccacagcagaagcgctgggcttggacaggcctgccagcgacaaacagagccctctcaacatcaatggtgctagttatctgcggctgccctgggtcaatccttacatggagggtgccacgccagccatctaccctttcctcgactcgccaaataagtattcactgaacatgtacaaggccttgctacctcagcagtcctacagcttggcccagccgctgtattctccagtctgcaccaatggggagcgctttctctacctgccgccacctcactacgtcggtccccacatcccatcgtccttggcatcacccatgaggctctcgacaccttcggcctccccagccatcccgcctctcgtccattgcgcagacaaaagcctcccgtggaagatgggcgtcagccctgggaatcctgttgattcccacgcctatcctcacatccagaacagtaagcagcccagggttccctctgccaaggcggtcaccagtggcctgccgggggacacagctctcctgttgcccccctcgcctcggccgtcaccccgagtccaccttcccacccagcctgctgcagacacctactcggagttccacaagcactatgccaggatctccacctctccttcagttgccctgtcaaagccatacatgacagttagcagcgagttccccgcggccaggctctccaatggcaagtatcccaaggctccggaagggggcgaaggtgcccagccagtgcccgggcatgcccggaagacagcggttcaagacagaaaagatggcagctcacctcctctgttggagaagcagaccgttaccaaagacgtcacagataagccactagacttgtcttctaaagtggtggatgtagatgcttccaaagctgaccacatgaaaaagatggctcccacggtcctggttcacagcagggctggaagtggcttagtgctctccggaagtgagattccgaaagaaacactatctcctccaggaaatggttgtgctatctatagatctgaaatcatcagcactgctccctcatcctgggtggtgcccgggccaagtcctaacgaagagaacaatggcaaaagcatgtcgctgaaaaacaaggcattggactgggcgataccacagcagcggagttcatcatgcccgcgcatgggcggcaccgatgctgtcatcactaacgtttcagggtcagtgtcgagtgcaggccgcccagcctccgcatcacccgcccccaatgccaatgcagatggcaccaaaaccagcaggagctctgtagaaaccacaccatccgttattcagcacgtgggccagcccccggccactcctgccaagcacagtagcagcaccagcagcaagggcgccaaagccagcaacccagaaccgagtttcaaagcaaacgagaacggccttccaccaagctctatatttctgtctccaaatgaggcattcaggtccccaccaattccctaccccaggagttacctcccttacccagcccctgagggcattgctgtaagtcccctctccttacatggcaaaggacctgtctaccctcacccagttttgttacccaatggcagtctgtttcctgggcaccttgccccaaagcctgggctgccctatgggcttcccaccggccgtccagagtttgtgacctaccaagatgccctggggttgggcatggtgcatcccatgttgataccacacacgcccatagagattactaaagaggagaaaccagagaggagatcccggtcccatgagagagcccgttacgaggacccaaccctccggaatcggttttccgagattttggaaactagcagcaccaagttacatccagatgtccccaccgacaagaacctaaagccgaaccccaactggaatcaagggaagactgttgtcaaaagcgacaagcttgtctacgtagaccttctccgagaagaaccagatgctaaaactgacacaaacgtgtccaaacccagctttgcagcagagagtgttggccagagcgctgagccccccaagccctcagttgagccggccctgcagcagcaccgtgatttcatcgccctgagagaggagttggggcgcatcagtgacttccacgaaacttatactttcaaacagccagtcttcaccgtaagcaaggacagtgttctggcaggtaccaacaaagagaacctagggttgccagtctcgactccattcctggagccacctctggggagcgatggccctgctgtaacttttggtaaaacccaagaggatcccaaaccattttgtgtgggcagtgccccaccaagtgtggatgtgacccccacctataccaaagatggagctgatgaggctgaatcaaatgatggcaaagttctgaaaccgaagccatctaagctggcaaagagaatcgccaactcagcgggttacgtgggtgaccgattcaaatgtgtcactaccgaactgtatgcagattccagtcagctcagccgggagcaacgggcattgcaggtgagcccccccacctgaatttcagttactttaccagttgtcagttttttaatgtgtaaacaggattgggggagtatggtagggcagggcaccaggcagatttggtgaatgaagcttgtggtaatttgaatatatgcaatgtggccagtaagagaacgtgagtggtagcactgaggcgtgtctggatgctttaagttattctgtagattataagggaactccactcaattgctgataaccgatgttttaattattgtgaagggtatctaaagactgcatgacgtttacctatcaattgctttgatttctctgcctgtaagatagcaaatatacctagaagtgctgcttagaatgccttacttgatacctggtagagatgtgtagcagccgcatgtctgtgggattcatgcaaatttttcaccaaaaagaaaggaaaaaaaaaagaaaaaaggttgcttaaagggatagagtatgtatttaacttgctagtgaattatgatagatgttgtataggaatttccttaagatattttacttttaattaaaagatgaataaagccaaattgttttgcaatgttaagaaaaaaattggtttatgcttataaaaatggatgaagttatctaaatgatccattgagtgcccattttaattacatagatggaaggattacaagaggacagtattttatgtctacccgctgcttactgtgaggtcagttcttcaaatttttattactagaatcttacataaaccttttgagttaaatttcatttccaaatatacaaagggaagtttgtgggccatggtcgtctttattcattgtgtattttgtttcttttctgttgtgtttttgttttgttttctttgcgttgtgttttcgttttgttttatttaccttcaaaagagaatgtctgtctgtatgcaatagtgtatgtgtggatatacatacacatcgcatatatatctatatacacatgactttatgaa

SEQ ID NO: 11180 - protein, 1004 aa, Homo sapiens; identical to SEQ ID NO: 1773

SEQ ID NO: 11181 - DNA, 4198 bp, Homo sapiens
atcttccgcaatccattcatgcactgaagcgcgtgcagagctgctgatcgctgccattgttactcgcgggcggtgtgggagctgagcctccactctggcgagagataaatggcctctgacagcccctcctcgccaagagagctcctcggatttcaccgcgcggcggctctcagactagacgcttgaagcaaagctgccatcccagaagacgacatgctctcagcaacccccctgtatgggaacgttcacagctggatgaacagcgagagggtccgcatgtgtggggcgagcgaagacaggaaaatccttgtaaatgatggtgacgcttcaaaagccagactggaactgagggaagagaatcccttgaaccacaacgtggtggatgcgagcacggcccataggatcgatggcctggcagcactgagcatggaccgcactggcctgatccgggaagggctgcgggtcccgggaaacatcgtctattctagcttgtgtggactgggctcagagaaaggtcgggaggctgccacaagcactctaggtggccttgggttttcttcggaaagaaatccagagatgcagttcaaaccgaatacacccgagacagtggaggcttctgccgtctctggaaaacccccaaatggcttcagtgctatatacaaaacaccgcctggaatacaaaaaagtgctgtagccacagcagaagcgctgggcttggacaggcctgccagcgacaaacagagccctctcaacatcaatggtgctagttatctgcggctgccctgggtcaatccttacatggagggtgccacgccagccatctaccctttcctcgactcgccaaataagtattcactgaacatgtacaaggccttgctacctcagcagtcctacagcttggcccagccgctgtattctccagtctgcaccaatggggagcgctttctctacctgccgccacctcactacgtcggtccccacatcccatcgtccttggcatcacccatgaggctctcgacaccttcggcctccccagccatcccgcctctcgtccattgcgcagacaaaagcctcccgtggaagatgggcgtcagccctgggaatcctgttgattcccacgcctatcctcacatccagaacagtaagcagcccagggttccctctgccaaggcggtcaccagtggcctgccgggggacacagctctcctgttgcccccctcgcctcggccgtcaccccgagtccaccttcccacccagcctgctgcagacacctactcggagttccacaagcactatgccaggatctccacctctccttcagttgccctgtcaaagccatacatgacagttagcagcgagttccccgcggccaggctctccaatggcaagtatcccaaggctccggaagggggcgaaggtgcccagccagtgcccgggcatgcccggaagacagcggttcaagacagaaaagatggcagctcacctcctctgttggagaagcagaccgttaccaaagacgtcacagataagccactagacttgtcttctaaagtggtggatgtagatgcttccaaagctgaccacatgaaaaagatggctcccacggtcctggttcacagcagggctggaagtggcttagtgctctccggaagtgagattccgaaagaaacactatctcctccaggaaatggttgtgctatctatagatctgaaatcatcagcactgctccctcatcctgggtggtgcccgggccaagtcctaacgaagagaacaatggcaaaagcatgtcgctgaaaaacaaggcattggactgggcgataccacagcagcggagttcatcatgcccgcgcatgggcggcaccgatgctgtcatcactaacgtttcagggtcagtgtcgagtgcaggccgcccagcctccgcatcacccgcccccaatgccaatgcagatggcaccaaaaccagcaggagctctgtagaaaccacaccatccgttattcagcacgtgggccagcccccggccactcctgccaagcacagtagcagcaccagcagcaagggcgccaaagccagcaacccagaaccgagtttcaaagcaaacgagaacggccttccaccaagctctatatttctgtctccaaatgaggcattcaggtccccaccaattccctaccccaggagttacctcccttacccagcccctgagggcattgctgtaagtcccctctccttacatggcaaaggacctgtctaccctcacccagttttgttacccaatggcagtctgtttcctgggcaccttgccccaaagcctgggctgccctatgggcttcccaccggccgtccagagtttgtgacctaccaagatgccctggggttgggcatggtgcatcccatgttgataccacacacgcccatagagattactaaagaggagaaaccagagaggagatcccggtcccatgagagagcccgttacgaggacccaaccctccggaatcggttttccgagattttggaaactagcagcaccaagttacatccagatgtccccaccgacaagaacctaaagccgaaccccaactggaatcaagggaagactgttgtcaaaagcgacaagcttgtctacgtagaccttctccgagaagaaccagatgctaaaactgacacaaacgtgtccaaacccagctttgcagcagagagtgttggccagagcgctgagccccccaagccctcagttgagccggccctgcagcagcaccgtgatttcatcgccctgagagaggagttggggcgcatcagtgacttccacgaaacttatactttcaaacagccagtcttcaccgtaagcaaggacagtgttctggcaggtaccaacaaagagaacctagggttgccagtctcgactccattcctggagccacctctggggagcgatggccctgctgtaacttttggtaaaacccaagaggatcccaaaccattttgtgtgggcagtgccccaccaagtgtggatgtgacccccacctataccaaagatggagctgatgaggctgaatcaaatgatggcaaagttctgaaaccgaagccatctaagctggcaaagagaatcgccaactcagcgggttacgtgggtgaccgattcaaatgtgtcactaccgaactgtatgcagattccagtcagctcagccgggagcaacgggcattgcaggtgagcccccccacctgaatttcagttactttaccagttgtcagttttttaatgtgtaaacaggattgggggagtatggtagggcagggcaccaggcagatttggtgaatgaagcttgtggtaatttgaatatatgcaatgtggccagtaagagaacgtgagtggtagcactgaggcgtgtctggatgctttaagttattctgtagattataagggaactccactcaattgctgataaccgatgttttaattattgtgaagggtatctaaagactgcatgacgtttacctatcaattgctttgatttctctgcctgtaagatagcaaatatacctagaagtgctgcttagaatgccttacttgatacctggtagagatgtgtagcagccgcatgtctgtgggattcatgcaaatttttcaccaaaaagaaaggaaaaaaaaaagaaaaaaggttgcttaaagggatagagtatgtatttaacttgctagtgaattatgatagatgttgtataggaatttccttaagatattttacttttaattaaaagatgaataaagccaaattgttttgcaatgttaagaaaaaaattggtttatgcttataaaaatggatgaagttatctaaatgatccattgagtgcccattttaattacatagatggaaggattacaagaggacagtattttatgtctacccgctgcttactgtgaggtcagttcttcaaatttttattactagaatcttacataaaccttttgagttaaatttcatttccaaatatacaaagggaagtttgtgggccatggtcgtctttattcattgtgtattttgtttcttttctgttgtgtttttgttttgttttctttgcgttgtgttttcgttttgttttatttaccttcaaaagagaatgtctgtctgtatgcaatagtgtatgtgtggatatacatacacatcgcatatatatctatatacacatgactttatgaa

SEQ ID NO: 11182 - protein, 1004 aa, Homo sapiens; identical to SEQ ID NO: 1773

SEQ ID NO: 11183 - DNA, 681 bp, Homo sapiens
acggaatgctggagtcagtggaagacggagctggtcggcccgaagaataattaacggcttaggtctcgattggtggaggtggtgggttagcactgaactctaaacagtaacatcacctactccaggaatggcccagtgcgatctgacacctgggacgctttcagggcaacaccaagggcaatgctccagtctgtatttactctcttctgaggagaaactctggcagcagctggaaaataaaacccaaagcaaggaagaagccgaaaagaagaaatactcaaatacgaggcgcattaatcatcggtgtcagatctagagcagaggacaatggctggtttgaagaaagactgaacctaaattatcttggaaactgatcttctctcctccgggttccctgtgcctgcaagcaggggtcccggtgcagccactggcatggaaccgatgggggcatccactggctgaccagcatgctttgtcacaggacaggttagagatgaccaccttctgtctgtggatcatccatagcttctgcttaggaagctacagaagagaaaaggcctctcacagggacctgcaggacaaattcattgcccatcgtgtcctcaggggacatcatttgcatgccaggatgcagtaaggccactgccttcagatccaaataaagcacccaattagcatgaa

SEQ ID NO: 11184 - protein, 62 aa, Homo sapiens
MAQCDLTPGTLSGQHQGQCSSLYLLSSEEKLWQQLENKTQSKEEAEKKKYSNTRRINHRCQI

SEQ ID NO: 11185 - DNA, 1339 bp, Homo sapiens
gatgggccccctcccctgacccctgtctacactcagccagaagctgatttgagctggtcccacagtgctgcctgtgggaacccaagcccttcctgctcctatctgcctctggctggatgacgccccgggcaattccgcccactgttttgaccccaggccccaaacctaggtgaggaacgccctcctcacagtccttccctgcttccagttcagtgttgacagtgagcagtgctcgctttgctatggctaggccctcactctcctctcttttcaaggccccaagagagtaagccatttattcacaccctatcttgacagcaaagccggggccttgaacctggggcactgctttcagccattattcttgcagaggccccagagctcccagcctgcatttttggagtctgagcagggcccacagctgttttgcttcagctaggagtgaaggctgacaaagagcaaggtctctggagaaggaggaaatgttttctggatgccaaactggtgactgtggggaggtgtggggcagcggggagggaggagctctcacttgtgcctagggaaaggtcatggtcaatgagaaagcctttgatggggagagtctgagatgggacccaggaacatcaccatgaagctgtccaggatggatgtgggaccctctgtcagaccaggccagttctcttaatgtaagatcagcaggccaaggtcctgggatatgggagctcccaggaagtggactgggatgcctgagggatccaagaattagcagtgtcctgtgtggtctcgctgagggaagccaggcaaaatctagcggctcagctgtaacagccggagctcttggctcccaagcaacaggaaacaattctggcttatttaagcagaaaaggactttatcaaaaggatcttggggaactcacaaaataaccaagagggctgaagaatacagttggtgagtcgaccaaggaggctgcacagcagtcaggaccacagccaaagtcaggcaatccagggatgacctcgctgccaaatccaggactccctggcatacactgccaccttgggacgtggatatggtccctgtcgccccaggaactggaatgccattgacttggcgactgccaccatccaccagaatggacttctgtgctccttgcatctctgtattattagttcccaactccaagcctttgatgggggcatctgatggattgagcctaagaaagacgaatgcccactttcggattccatcttctgccgcggacgcatccgggacgcgcagccgcccggcgcagaggaagcccgggacgctggggacaccgcctggagcctccgcgcatag

SEQ ID NO: 11186 - protein, 88 aa, Homo sapiens
MVPVAPGTGMPLTWRLPPSTRMDFCAPCISVLLVPNSKPLMGASDGLSLRKTNAHFRIPSSAADASGTRSRPAQRKPGTLGTPPGASA

SEQ ID NO: 11187 - DNA, 3584 bp, Homo sapiens
gatgggccccctcccctgacccctgtctacactcagccagaagctgatttgagctggtcccacagtgctgcctgtgggaacccaagcccttcctgctcctatctgcctctggctggatgacgccccgggcaattccgcccactgttttgaccccaggccccaaacctaggtgaggaacgccctcctcacagtccttccctgcttccagttcagtgttgacagtgagcagtgctcgctttgctatggctaggccctcactctcctctcttttcaaggccccaagagagtaagccatttattcacaccctatcttgacagcaaagccggggccttgaacctggggcactgctttcagccattattcttgcagaggccccagagctcccagcctgcatttttggagtctgagcagggcccacagctgttttgcttcagctaggagtgaaggctgacaaagagcaaggtctctggagaaggaggaaatgttttctggatgccaaactggtgactgtggggaggtgtggggcagcggggagggaggagctctcacttgtgcctagggaaaggtcatggtcaatgagaaagcctttgatggggagagtctgagatgggacccaggaacatcaccatgaagctgtccaggatggatgtgggaccctctgtcagaccaggccagttctcttaatgtaagatcagcaggccaaggtcctgggatatgggagctcccaggaagtggactgggatgcctgagggatccaagaattagcagtgtcctgtgtggtctcgctgagggaagccaggcaaaatctagcggctcagctgtaacagccggagctcttggctcccaagcaacaggaaacaattctggcttatttaagcagaaaaggactttatcaaaaggatcttggggaactcacaaaataaccaagagggctgaagaatacagttggtgagtcgaccaaggaggctgcacagcagtcaggaccacagccaaagtcaggcaatccagggatgacctcgctgccaaatccaggactccctggcatacactgccaccttgggacgtggatatggtccctgtcgccccaggaactggaatgccattgacttggcgactgccaccatccaccagaatggacttctgtgctccttgcatctctgtattattagttcccaactccaagcctttgatgggggcatctgatggattgagcctaaggattctgatggtgcctgttggctgcttccgtgatgtctggagttgcaaaatgtgccagaaagcagaaggatacaccgctattcagagaggattttcttagggacttgaagaaattgacctcaaaatttcagtagatgagaggactgtggctggcctgtgtctttggcactggttgttggagcccaatgaaaaattctacattgaagactaagggaaaaagaggtttcattatagagctgggactgattgcattttcaaaaggtggctgcaacaatatcccacacacttttctgctgtataatctgccacttctccatcaagtagaggagacaatttctcccctcctttgaatctgagtgagttctgtgactgttttgactgatagaatgatgtggaagacagactgtgtgacctgaaaggtgaggtcacagaaagccttgcaacttccacctggcctgtgaagaacacttgctcttgggatactccttcttggaacccagccaccatgctgtaagaagcccaatctacatgcagacaccacatataaggcatcgtagtcaacagccacagttaagttcccagccggcagccaacatcaactaccagtcttgtgagtgagctatcttggacatccagcttggttaaaccttcagatgactccagccccagctgacacctgactgcaaccacatgagaaaccaggaatgaaaatccaccagctgagcccagtcaactcatagaactgtgagagataataataagttgtggtactaagccactaggattggggcaccatgcaataataggtaaccaagacagtagcaactttggttagacacatgagccatgggatgacacataattaggtatatttttaaaaacttggattcagctttagggcaatgtgtccctaacatagagaggcactatttcagttcacatctgctgcctctgatcaaaacactctcttgcacttccagagagagagagagagagagcaaatgtgtgtatttactgacaggtgtccctttgtgtccccatctgtgtgactgtggagctcagtgtctctcacacattctagtatgatacttggtgccatatttgcaggtcctgaggtaagaacccatgctgttgtcttcagagagtttcatgggttggactgtgccatatatgggcaaaaatccacccacacgttttcttttaatcacctttatggatgtataatttacatatatacttttttcttattactttttatttatgtaatttattcattttttgagatagggtctcactctcttgcccaggctggagtgcagtggagtgatcatggctcactgcagccttgacctcctgggcttaagcaatcctcccacttcagccacctgagtagctgggaccacaggcacacaccaccactcctggctaatttaaaaagttgtttttttttttttttttgtagagacagggtctcactatgttgtcaaggctggtctcaaactcctgggctcaagcgatcctagtgcctcagccttccaaagttccgggattacaagcatgagccaccatgcctggcatcttttgtggatgtgtaatttacatacgtacaataatatgtacctattttaagtatacagtttgatgagctttgacgaatgtagcccacgaaaccaccaccataatcgaagtatagaactttttttttttttttttttgagacgaagtctctctcttgtcacccaggctggagtgcaatggcatgatcccggctcactgaaacttccgcctcccaggttcaagcgattctcctgcctcagcctcctgagtagctgggattacaggcacctgccaccacgcccagctaatttttgtatttttagtagagacagggtttcaccatgctggccaggctggtctcgagctcctgacctcaggtgatcccccctcctcggcctcccaaagtgctgggattacaggcatgagccactgcgcccggcctatagaacattttaatcaccccagagatgtgccccctgtgcagccagttccctcctctcaccccccagcccctggcaagcattgatttgctttgccactatcaatcaatttttgtcttttctggtatttcatatgaatggaatcatataggatagatttttatgtgactacacactattttagcataatatttttgaagttcttccatgttgttgtgtatatctatagttaatttctttttctcactgaattgtataccactgtatgatgtatcacaatttgtttattcattctcccgttgctggacatttggactgtttattgtttggggctactatgaataaaactgctatggatgtttatgtac

SEQ ID NO: 11188 - protein, 82 aa, Homo sapiens
MVPVAPGTGMPLTWRLPPSTRMDFCAPCISVLLVPNSKPLMGASDGLSLRILMVPVGCFRDVWSCKMCQKAEGYTAIQRGFS

SEQ ID NO: 11189 - DNA, 4225 bp, Homo sapiens
cccgccgcccgcgccggggcggtcgcctgcagaggaaggcgccgcagtctctgggcctcgcggccccactcgagcgtcctcggcaccgagggctcgcgggtcctgaggggaggaggcgatcccggggctgggcactgagctcttgggcgcccccacccccgttttcgaagccctccacgctgcggccgctatcccctccggaccatggccgacgacgacgtgctgttcgaggatgtgtacgagctgtgcgaggtgatcggaaagggtcccttcagtgttgtacgacgatgtatcaacagagaaactgggcaacaatttgctgtaaaaattgttgatgtagccaagttcacatcaagtccagggttaagtacagaagatctaaagcgggaagccagtatctgtcatatgctgaaacatccacacattgtagagttattggagacatatagctcagatggaatgctttacatggttttcgaatttatggatggagcagatctgtgttttgaaatcgtaaagcgagctgacgctggttttgtgtacagtgaagctgtagccagccattatatgagacagatactggaagctctacgctactgccatgataataacataattcacagggatgtgaagccccactgtgttctccttgcctcaaaagaaaactcggcacctgttaaacttggaggctttggggtagctattcaattaggggagtctggacttgtagctggaggacgtgttggaacacctcattttatggcaccagaagtggtcaaaagagagccttacggaaagcctgtagacgtctgggggtgcggtgtgatcctttttatcctgctcagtggttgtttgcctttttacggaaccaaggaaagattgtttgaaggcattattaaaggaaaatataagatgaatccaaggcagtggagccatatctctgaaagtgccaaagacctagtacgtcgcatgctgatgctggatccagctgaaaggatcactgtttatgaagcactgaatcacccatggcttaaggagcgggatcgttacgcctacaagattcatcttccagaaacagtagagcagctgaggaaattcaatgcaaggaggaaactaaagggtgcagtactagccgctgtgtcaagtcacaaattcaactcattctatggggatccccctgaagagttaccagatttctccgaagaccctacctcctcaggacttctagcagcagaaagagcagtctcacaggtgctggacagcctggaagagattcatgcgcttacagactgcagtgaaaaggacctagattttctacacagtgttttccaggatcagcatcttcacacactactagatctgtatgacaaaattaacacaaagtcttcaccacaaatcaggaatcctccaagcgatgcagtacagagagccaaagaggtattggaagaaatttcatgttaccctgagaataacgacgcaaaggaactaaagcgtattttaacacaacctcatttcatggccttacttcagactcacgacgtagtggcacatgaagtttacagtgatgaagcattgagggtcacacctcctcccacctctccctatttaaacggcgattctccagaaagtgctaacggagacatggatatggagaatgtgaccagagttcggctggtacagtttcaaaagaacacagatgaaccaatgggaatcactttaaaaatgaatgaactaaatcattgtattgttgcaagaattatgcatgggggcatgattcacaggcaaggtacacttcatgttggtgatgaaattcgagaaatcaatggcatcagtgtggctaaccaaacagtggaacaactgcaaaaaatgcttagggaaatgcgggggagtattaccttcaagattgtgccaagttaccgcactcagtcttcgtcctgtgagagagattccccttccacttccagacagtccccagctaatggtcatagcagcactaacaattctgtttcggacttgccatcaactacccaaccaaaaggacgacagatctatgtaagagcacaatttgaatatgatccagccaaggatgacctcatcccctgtaaagaagctggcattcgattcagagttggtgacatcatccagattattagtaaggatgatcataattggtggcagggtaaactggaaaactccaaaaatggaactgcaggtctcattccttctcctgaacttcaggaatggcgagtagcttgcattgccatggagaagaccaaacaggagcagcaggccagctgtacttggtttggcaagaaaaagaagcagtacaaagataaatatttggcaaagcacaatgcagtgtttgatcaattagatcttgtcacatatgaagaagtagtaaaactgccagcattcaagaggaaaacactagtcttattaggcgcacatggtgttgggagaagacacataaaaaacactctcatcacaaagcacccagaccggtttgcgtaccctattccacatacaaccagacctccaaagaaagacgaagaaaatggaaagaattattactttgtatctcatgaccaaatgatgcaagacatctctaataacgagtacttggagtacggcagccacgaggatgcgatgtatgggacaaaactggagaccatccggaagatccacgagcaggggctgattgcaatactggacgtggagcctcaggcactgaaggtcctgagaactgcagagtttgctccttttgttgttttcattgctgcaccaactattactccaggtttaaatgaggatgaatctcttcagcgtctgcagaaggagtctgacatcttacagagaacatatgcacactacttcgatctcacaattatcaacaatgaaattgatgagacaatcagacatctggaggaagctgttgagctcgtgtgcacagccccacagtgggtccctgtctcctgggtctattaggcctctccccagatatctgagcataactgggagcacctcatttgtggaaaagcctctttgttatcggccttgtgtcagcaggtcatggtccctagagactacctagttgtagtgtgacctacatttataattattgtcatgtccgaatagataggaggagaaaaacaattacacactaatttaaagagacagtatcttttttaatcagttctcctaaactttaataaaatgtatctttaaatgtatgtattattcaatcctttggaatgttatatttttggaaatcatagctttttatttccaaggcccctaaaaactgcacaaaatagatgctgctttctataatctattttaataataataaacaatgattctgttaccttgactgggggtggaacactacattctttttagagtctgattttatggattggaatattgggatatctttctttcctttatttatttgaaataattagtgtagtgattacaaaacagtcataaatttttaaaggccttttttctctctttttttttttttagaatagtatttttttttaagtcctttatgtaacatccagataatgtgatactgtctctttgaagcaccctgtaaaccttttagagatttgaagttgggtcttgactcttaatgcatgtggacagtcgcgagcgtttatgctgtcggtgtgtctgtgttggacaaaacaatctgtaatctacagcaaagtacattctacattccgttcatggggcacacccaggggaataagaataaaatgctattatgactaagttgtaaacctatgcacatcccttgcattttgggcaactttataaaaaaaaagaaactgatttttattaataataatcatgtagtgaaatgtgtttgtaattttgtctcaatttaatttgttgtaaggtggggtggggggaattgctggtttcaccatttcagatctgtgttgtctaagagtattaacgttttaattaagcaaagaaatgatttttaatctgtatgtaattgttttaaagcacccattttaagagaaaatactgtgcaatgaagaaaccagtttaggcatttgctataaactgaaatattccaaaagaatcatctataacagccctgtaaattcctttaaaatgataactaacaggacagtttgaccaattttttttaaatatacttccttttatgtgttcaataattaaatgcctttgggtccttcatttcatt

SEQ ID NO: 11190 - protein, 926 aa, Homo sapiens
MADDDVLFEDVYELCEVIGKGPFSVVRRCINRETGQQFAVKIVDVAKFTSSPGLSTEDLKREASICHMLKHPHIVELLETYSSDGMLYMVFEFMDGADLCFEIVKRADAGFVYSEAVASHYMRQILEALRYCHDNNIIHRDVKPHCVLLASKENSAPVKLGGFGVAIQLGESGLVAGGRVGTPHFMAPEVVKREPYGKPVDVWGCGVILFILLSGCLPFYGTKERLFEGIIKGKYKMNPRQWSHISESAKDLVRRMLMLDPAERITVYEALNHPWLKERDRYAYKIHLPETVEQLRKFNARRKLKGAVLAAVSSHKFNSFYGDPPEELPDFSEDPTSSGLLAAERAVSQVLDSLEEIHALTDCSEKDLDFLHSVFQDQHLHTLLDLYDKINTKSSPQIRNPPSDAVQRAKEVLEEISCYPENNDAKELKRILTQPHFMALLQTHDVVAHEVYSDEALRVTPPPTSPYLNGDSPESANGDMDMENVTRVRLVQFQKNTDEPMGITLKMNELNHCIVARIMHGGMIHRQGTLHVGDEIREINGISVANQTVEQLQKMLREMRGSITFKIVPSYRTQSSSCERDSPSTSRQSPANGHSSTNNSVSDLPSTTQPKGRQIYVRAQFEYDPAKDDLIPCKEAGIRFRVGDIIQIISKDDHNWWQGKLENSKNGTAGLIPSPELQEWRVACIAMEKTKQEQQASCTWFGKKKKQYKDKYLAKHNAVFDQLDLVTYEEVVKLPAFKRKTLVLLGAHGVGRRHIKNTLITKHPDRFAYPIPHTTRPPKKDEENGKNYYFVSHDQMMQDISNNEYLEYGSHEDAMYGTKLETIRKIHEQGLIAILDVEPQALKVLRTAEFAPFVVFIAAPTITPGLNEDESLQRLQKESDILQRTYAHYFDLTIINNEIDETIRHLEEAVELVCTAPQWVPVSWVY

SEQ ID NO: 11191 - DNA, 4207 bp, Homo sapiens
cccgccgcccgcgccggggcggtcgcctgcagaggaaggcgccgcagtctctgggcctcgcggccccactcgagcgtcctcggcaccgagggctcgcgggtcctgaggggaggaggcgatcccggggctgggcactgagctcttgggcgcccccacccccgttttcgaagccctccacgctgcggccgctatcccctccggaccatggccgacgacgacgtgctgttcgaggatgtgtacgagctgtgcgaggtgatcggaaagggtcccttcagtgttgtacgacgatgtatcaacagagaaactgggcaacaatttgctgtaaaaattgttgatgtagccaagttcacatcaagtccagggttaagtacagaagatctaaagcgggaagccagtatctgtcatatgctgaaacatccacacattgtagagttattggagacatatagctcagatggaatgctttacatggttttcgaatttatggatggagcagatctgtgttttgaaatcgtaaagcgagctgacgctggttttgtgtacagtgaagctgtagccagccattatatgagacagatactggaagctctacgctactgccatgataataacataattcacagggatgtgaagccccactgtgttctccttgcctcaaaagaaaactcggcacctgttaaacttggaggctttggggtagctattcaattaggggagtctggacttgtagctggaggacgtgttggaacacctcattttatggcaccagaagtggtcaaaagagagccttacggaaagcctgtagacgtctgggggtgcggtgtgatcctttttatcctgctcagtggttgtttgcctttttacggaaccaaggaaagattgtttgaaggcattattaaaggaaaatataagatgaatccaaggcagtggagccatatctctgaaagtgccaaagacctagtacgtcgcatgctgatgctggatccagctgaaaggatcactgtttatgaagcactgaatcacccatggcttaaggagcgggatcgttacgcctacaagattcatcttccagaaacagtagagcagctgaggaaattcaatgcaaggaggaaactaaagggtgcagtactagccgctgtgtcaagtcacaaattcaactcattctatggggatccccctgaagagttaccagatttctccgaagaccctacctcctcaggagcagtctcacaggtgctggacagcctggaagagattcatgcgcttacagactgcagtgaaaaggacctagattttctacacagtgttttccaggatcagcatcttcacacactactagatctgtatgacaaaattaacacaaagtcttcaccacaaatcaggaatcctccaagcgatgcagtacagagagccaaagaggtattggaagaaatttcatgttaccctgagaataacgacgcaaaggaactaaagcgtattttaacacaacctcatttcatggccttacttcagactcacgacgtagtggcacatgaagtttacagtgatgaagcattgagggtcacacctcctcccacctctccctatttaaacggcgattctccagaaagtgctaacggagacatggatatggagaatgtgaccagagttcggctggtacagtttcaaaagaacacagatgaaccaatgggaatcactttaaaaatgaatgaactaaatcattgtattgttgcaagaattatgcatgggggcatgattcacaggcaaggtacacttcatgttggtgatgaaattcgagaaatcaatggcatcagtgtggctaaccaaacagtggaacaactgcaaaaaatgcttagggaaatgcgggggagtattaccttcaagattgtgccaagttaccgcactcagtcttcgtcctgtgagagagattccccttccacttccagacagtccccagctaatggtcatagcagcactaacaattctgtttcggacttgccatcaactacccaaccaaaaggacgacagatctatgtaagagcacaatttgaatatgatccagccaaggatgacctcatcccctgtaaagaagctggcattcgattcagagttggtgacatcatccagattattagtaaggatgatcataattggtggcagggtaaactggaaaactccaaaaatggaactgcaggtctcattccttctcctgaacttcaggaatggcgagtagcttgcattgccatggagaagaccaaacaggagcagcaggccagctgtacttggtttggcaagaaaaagaagcagtacaaagataaatatttggcaaagcacaatgcagtgtttgatcaattagatcttgtcacatatgaagaagtagtaaaactgccagcattcaagaggaaaacactagtcttattaggcgcacatggtgttgggagaagacacataaaaaacactctcatcacaaagcacccagaccggtttgcgtaccctattccacatacaaccagacctccaaagaaagacgaagaaaatggaaagaattattactttgtatctcatgaccaaatgatgcaagacatctctaataacgagtacttggagtacggcagccacgaggatgcgatgtatgggacaaaactggagaccatccggaagatccacgagcaggggctgattgcaatactggacgtggagcctcaggcactgaaggtcctgagaactgcagagtttgctccttttgttgttttcattgctgcaccaactattactccaggtttaaatgaggatgaatctcttcagcgtctgcagaaggagtctgacatcttacagagaacatatgcacactacttcgatctcacaattatcaacaatgaaattgatgagacaatcagacatctggaggaagctgttgagctcgtgtgcacagccccacagtgggtccctgtctcctgggtctattaggcctctccccagatatctgagcataactgggagcacctcatttgtggaaaagcctctttgttatcggccttgtgtcagcaggtcatggtccctagagactacctagttgtagtgtgacctacatttataattattgtcatgtccgaatagataggaggagaaaaacaattacacactaatttaaagagacagtatcttttttaatcagttctcctaaactttaataaaatgtatctttaaatgtatgtattattcaatcctttggaatgttatatttttggaaatcatagctttttatttccaaggcccctaaaaactgcacaaaatagatgctgctttctataatctattttaataataataaacaatgattctgttaccttgactgggggtggaacactacattctttttagagtctgattttatggattggaatattgggatatctttctttcctttatttatttgaaataattagtgtagtgattacaaaacagtcataaatttttaaaggccttttttctctctttttttttttttagaatagtatttttttttaagtcctttatgtaacatccagataatgtgatactgtctctttgaagcaccctgtaaaccttttagagatttgaagttgggtcttgactcttaatgcatgtggacagtcgcgagcgtttatgctgtcggtgtgtctgtgttggacaaaacaatctgtaatctacagcaaagtacattctacattccgttcatggggcacacccaggggaataagaataaaatgctattatgactaagttgtaaacctatgcacatcccttgcattttgggcaactttataaaaaaaaagaaactgatttttattaataataatcatgtagtgaaatgtgtttgtaattttgtctcaatttaatttgttgtaaggtggggtggggggaattgctggtttcaccatttcagatctgtgttgtctaagagtattaacgttttaattaagcaaagaaatgatttttaatctgtatgtaattgttttaaagcacccattttaagagaaaatactgtgcaatgaagaaaccagtttaggcatttgctataaactgaaatattccaaaagaatcatctataacagccctgtaaattcctttaaaatgataactaacaggacagtttgaccaattttttttaaatatacttccttttatgtgttcaataattaaatgcctttgggtccttcatttcatt

SEQ ID NO: 11192 - protein, 920 aa, Homo sapiens
MADDDVLFEDVYELCEVIGKGPFSVVRRCINRETGQQFAVKIVDVAKFTSSPGLSTEDLKREASICHMLKHPHIVELLETYSSDGMLYMVFEFMDGADLCFEIVKRADAGFVYSEAVASHYMRQILEALRYCHDNNIIHRDVKPHCVLLASKENSAPVKLGGFGVAIQLGESGLVAGGRVGTPHFMAPEVVKREPYGKPVDVWGCGVILFILLSGCLPFYGTKERLFEGIIKGKYKMNPRQWSHISESAKDLVRRMLMLDPAERITVYEALNHPWLKERDRYAYKIHLPETVEQLRKFNARRKLKGAVLAAVSSHKFNSFYGDPPEELPDFSEDPTSSGAVSQVLDSLEEIHALTDCSEKDLDFLHSVFQDQHLHTLLDLYDKINTKSSPQIRNPPSDAVQRAKEVLEEISCYPENNDAKELKRILTQPHFMALLQTHDVVAHEVYSDEALRVTPPPTSPYLNGDSPESANGDMDMENVTRVRLVQFQKNTDEPMGITLKMNELNHCIVARIMHGGMIHRQGTLHVGDEIREINGISVANQTVEQLQKMLREMRGSITFKIVPSYRTQSSSCERDSPSTSRQSPANGHSSTNNSVSDLPSTTQPKGRQIYVRAQFEYDPAKDDLIPCKEAGIRFRVGDIIQIISKDDHNWWQGKLENSKNGTAGLIPSPELQEWRVACIAMEKTKQEQQASCTWFGKKKKQYKDKYLAKHNAVFDQLDLVTYEEVVKLPAFKRKTLVLLGAHGVGRRHIKNTLITKHPDRFAYPIPHTTRPPKKDEENGKNYYFVSHDQMMQDISNNEYLEYGSHEDAMYGTKLETIRKIHEQGLIAILDVEPQALKVLRTAEFAPFVVFIAAPTITPGLNEDESLQRLQKESDILQRTYAHYFDLTIINNEIDETIRHLEEAVELVCTAPQWVPVSWVY

SEQ ID NO: 11193 - DNA, 4180 bp, Homo sapiens
cccgccgcccgcgccggggcggtcgcctgcagaggaaggcgccgcagtctctgggcctcgcggccccactcgagcgtcctcggcaccgagggctcgcgggtcctgaggggaggaggcgatcccggggctgggcactgagctcttgggcgcccccacccccgttttcgaagccctccacgctgcggccgctatcccctccggaccatggccgacgacgacgtgctgttcgaggatgtgtacgagctgtgcgaggtgatcggaaagggtcccttcagtgttgtacgacgatgtatcaacagagaaactgggcaacaatttgctgtaaaaattgttgatgtagccaagttcacatcaagtccagggttaagtacagaagatctaaagcgggaagccagtatctgtcatatgctgaaacatccacacattgtagagttattggagacatatagctcagatggaatgctttacatggttttcgaatttatggatggagcagatctgtgttttgaaatcgtaaagcgagctgacgctggttttgtgtacagtgaagctgtagccagccattatatgagacagatactggaagctctacgctactgccatgataataacataattcacagggatgtgaagccccactgtgttctccttgcctcaaaagaaaactcggcacctgttaaacttggaggctttggggtagctattcaattaggggagtctggacttgtagctggaggacgtgttggaacacctcattttatggcaccagaagtggtcaaaagagagccttacggaaagcctgtagacgtctgggggtgcggtgtgatcctttttatcctgctcagtggttgtttgcctttttacggaaccaaggaaagattgtttgaaggcattattaaaggaaaatataagatgaatccaaggcagtggagccatatctctgaaagtgccaaagacctagtacgtcgcatgctgatgctggatccagctgaaaggatcactgtttatgaagcactgaatcacccatggcttaaggagcgggatcgttacgcctacaagattcatcttccagaaacagtagagcagctgaggaaattcaatgcaaggaggaaactaaagggtgcagtactagccgctgtgtcaagtcacaaattcaactcattctatggggatccccctgaagagttaccagatttctccgaagaccctacctcctcaggagcagtctcacaggtgctggacagcctggaagagattcatgcgcttacagactgcagtgaaaaggacctagattttctacacagtgttttccaggatcagcatcttcacacactactagatctgtatgacaaaattaacacaaagtcttcaccacaaatcaggaatcctccaagcgatgcagtacagagagccaaagaggtattggaagaaatttcatgttaccctgagaataacgacgcaaaggaactaaagcgtattttaacacaacctcatttcatggccttacttcagactcacgacgtagtggcacatgaagtttacagtgatgaagcattgagggtcacacctcctcccacctctccctatttaaacggcgattctccagaaagtgctaacggagacatggatatggagaatgtgaccagagttcggctggtacagtttcaaaagaacacagatgaaccaatgggaatcactttaaaaatgaatgaactaaatcattgtattgttgcaagaattatgcatgggggcatgattcacaggcaaggtacacttcatgttggtgatgaaattcgagaaatcaatggcatcagtgtggctaaccaaacagtggaacaactgcaaaaaatgcttagggaaatgcgggggagtattaccttcaagattgtgccaagttaccgcactcagtcttcgtcctgtgagagagattccccttccacttccagacagtccccagctaatggtcatagcagcactaacaattctgtttcggacttgccatcaactacccaaccaaaaggacgacagatctatgtaagagcacaatttgaatatgatccagccaaggatgacctcatcccctgtaaagaagctggcattcgattcagagttggtgacatcatccagattattagtaaggatgatcataattggtggcagggtaaactggaaaactccaaaaatggaactgcaggtctcattccttctcctgaacttcaggaatggcgagtagcttgcattgccatggagaagaccaaacaggagcagcaggccagctgtacttggtttggcaagaaaaagaagcagtacaaagataaatatttggcaaagcacaatgcagtgtttgatcaattagatcttgtcacatatgaagaagtagtaaaactgccagcattcaagaggaaaacactagtcttattaggcgcacatggtgttgggagaagacacataaaaaacactctcatcacaaagcacccagaccggtttgcgtaccctattccacatacaaccagacctccaaagaaagacgaagaaaatggaaagaattattactttgtatctcatgaccaaatgatgcaagacatctctaataacgagtacttggagtacggcagccacgaggatgcgatgtatgggacaaaactggagaccatccggaagatccacgagcaggggctgattgcaatactggacgtggagcctcaggcactgaaggtcctgagaactgcagagtttgctccttttgttgttttcattgctgcaccaactattactccaggtttaaatgaggatgaatctcttcagcgtctgcagaaggagtctgacatcttacagagaacatatgcacactacttcgatctcacaattatcaacaatgaaattgatgagacaatcagacatctggaggaagctgttgagctcgtgtgcacagccccacagtgggtccctgtctcctgggtctattaggcctctccccagatatctgagcataactgggagcacctcatttgtggaaaagcctctttgttatcggccttgtgtcagcaggtcatggtccctagagactacctagttgtagtgtgacctacatttataattattgtcatgtccgaatagataggaggagaaaaacaattacacactaatttaaagagacagtatcttttttaatcagttctcctaaactttaataaaatgtatctttaaatgtatgtattattcaatcctttggaatgttatatttttggaaatcatagctttttatttccaaggcccctaaaaactgcacaaaatagatgctgctttctataatctattttaataataataaacaatgattctgttaccttgactgggggtggaacactacattctttttagagtctgattttatggattggaatattgggatatctttctttcctttatttatttgaaataattagtgtagtgattacaaaacagtcataaatttttaaaggccttttttctctctttttttttttttagaatagtatttttttttaagtcctttatgtaacatccagataatgtgatactgtctctttgaagcaccctgtaaaccttttagagatttgaagttgggtcttgactcttaatgcatgtggacagtcgcgagcgtttatgctgtcggtgtgtctgtgttggacaaaacaatctgtaatctacagcaaagtacattctacattccgttcatggggcacacccaggggaataagaataaaatgctattatgactaagttgtaaacctatgcacatcccttgcattttgggcaactttataaaaaaaaagaaactgatttttattaataataatcatgtagtgaaatgtgtttgtaattttgtctcaatttaatttgttgtaaggtggggtggggggaattgctggtttcaccatttcagatctgtgttgtctaagagtattaacgttttaattaagcaaagaaatgatttttaatctgtatgtaattgttttaaagcacccattttaagagaaaatactgtgcaatgaagaaaccagtttaggcatttgctataaactgaaatattccaaaagaatcatctataacagccctgtaaattcctttaaaatgataactaacaggacagtttgaccaattttttttaaatatacttccttttatgtgttcaataatt

SEQ ID NO: 11194 - protein, 920 aa, Homo sapiens; identical to SEQ ID NO: 11192

SEQ ID NO: 11195 - DNA, 4198 bp, Homo sapiens
cccgccgcccgcgccggggcggtcgcctgcagaggaaggcgccgcagtctctgggcctcgcggccccactcgagcgtcctcggcaccgagggctcgcgggtcctgaggggaggaggcgatcccggggctgggcactgagctcttgggcgcccccacccccgttttcgaagccctccacgctgcggccgctatcccctccggaccatggccgacgacgacgtgctgttcgaggatgtgtacgagctgtgcgaggtgatcggaaagggtcccttcagtgttgtacgacgatgtatcaacagagaaactgggcaacaatttgctgtaaaaattgttgatgtagccaagttcacatcaagtccagggttaagtacagaagatctaaagcgggaagccagtatctgtcatatgctgaaacatccacacattgtagagttattggagacatatagctcagatggaatgctttacatggttttcgaatttatggatggagcagatctgtgttttgaaatcgtaaagcgagctgacgctggttttgtgtacagtgaagctgtagccagccattatatgagacagatactggaagctctacgctactgccatgataataacataattcacagggatgtgaagccccactgtgttctccttgcctcaaaagaaaactcggcacctgttaaacttggaggctttggggtagctattcaattaggggagtctggacttgtagctggaggacgtgttggaacacctcattttatggcaccagaagtggtcaaaagagagccttacggaaagcctgtagacgtctgggggtgcggtgtgatcctttttatcctgctcagtggttgtttgcctttttacggaaccaaggaaagattgtttgaaggcattattaaaggaaaatataagatgaatccaaggcagtggagccatatctctgaaagtgccaaagacctagtacgtcgcatgctgatgctggatccagctgaaaggatcactgtttatgaagcactgaatcacccatggcttaaggagcgggatcgttacgcctacaagattcatcttccagaaacagtagagcagctgaggaaattcaatgcaaggaggaaactaaagggtgcagtactagccgctgtgtcaagtcacaaattcaactcattctatggggatccccctgaagagttaccagatttctccgaagaccctacctcctcaggacttctagcagcagaaagagcagtctcacaggtgctggacagcctggaagagattcatgcgcttacagactgcagtgaaaaggacctagattttctacacagtgttttccaggatcagcatcttcacacactactagatctgtatgacaaaattaacacaaagtcttcaccacaaatcaggaatcctccaagcgatgcagtacagagagccaaagaggtattggaagaaatttcatgttaccctgagaataacgacgcaaaggaactaaagcgtattttaacacaacctcatttcatggccttacttcagactcacgacgtagtggcacatgaagtttacagtgatgaagcattgagggtcacacctcctcccacctctccctatttaaacggcgattctccagaaagtgctaacggagacatggatatggagaatgtgaccagagttcggctggtacagtttcaaaagaacacagatgaaccaatgggaatcactttaaaaatgaatgaactaaatcattgtattgttgcaagaattatgcatgggggcatgattcacaggcaaggtacacttcatgttggtgatgaaattcgagaaatcaatggcatcagtgtggctaaccaaacagtggaacaactgcaaaaaatgcttagggaaatgcgggggagtattaccttcaagattgtgccaagttaccgcactcagtcttcgtcctgtgagagagattccccttccacttccagacagtccccagctaatggtcatagcagcactaacaattctgtttcggacttgccatcaactacccaaccaaaaggacgacagatctatgtaagagcacaatttgaatatgatccagccaaggatgacctcatcccctgtaaagaagctggcattcgattcagagttggtgacatcatccagattattagtaaggatgatcataattggtggcagggtaaactggaaaactccaaaaatggaactgcaggtctcattccttctcctgaacttcaggaatggcgagtagcttgcattgccatggagaagaccaaacaggagcagcaggccagctgtacttggtttggcaagaaaaagaagcagtacaaagataaatatttggcaaagcacaatgcagtgtttgatcaattagatcttgtcacatatgaagaagtagtaaaactgccagcattcaagaggaaaacactagtcttattaggcgcacatggtgttgggagaagacacataaaaaacactctcatcacaaagcacccagaccggtttgcgtaccctattccacatacaaccagacctccaaagaaagacgaagaaaatggaaagaattattactttgtatctcatgaccaaatgatgcaagacatctctaataacgagtacttggagtacggcagccacgaggatgcgatgtatgggacaaaactggagaccatccggaagatccacgagcaggggctgattgcaatactggacgtggagcctcaggcactgaaggtcctgagaactgcagagtttgctccttttgttgttttcattgctgcaccaactattactccaggtttaaatgaggatgaatctcttcagcgtctgcagaaggagtctgacatcttacagagaacatatgcacactacttcgatctcacaattatcaacaatgaaattgatgagacaatcagacatctggaggaagctgttgagctcgtgtgcacagccccacagtgggtccctgtctcctgggtctattaggcctctccccagatatctgagcataactgggagcacctcatttgtggaaaagcctctttgttatcggccttgtgtcagcaggtcatggtccctagagactacctagttgtagtgtgacctacatttataattattgtcatgtccgaatagataggaggagaaaaacaattacacactaatttaaagagacagtatcttttttaatcagttctcctaaactttaataaaatgtatctttaaatgtatgtattattcaatcctttggaatgttatatttttggaaatcatagctttttatttccaaggcccctaaaaactgcacaaaatagatgctgctttctataatctattttaataataataaacaatgattctgttaccttgactgggggtggaacactacattctttttagagtctgattttatggattggaatattgggatatctttctttcctttatttatttgaaataattagtgtagtgattacaaaacagtcataaatttttaaaggccttttttctctctttttttttttttagaatagtatttttttttaagtcctttatgtaacatccagataatgtgatactgtctctttgaagcaccctgtaaaccttttagagatttgaagttgggtcttgactcttaatgcatgtggacagtcgcgagcgtttatgctgtcggtgtgtctgtgttggacaaaacaatctgtaatctacagcaaagtacattctacattccgttcatggggcacacccaggggaataagaataaaatgctattatgactaagttgtaaacctatgcacatcccttgcattttgggcaactttataaaaaaaaagaaactgatttttattaataataatcatgtagtgaaatgtgtttgtaattttgtctcaatttaatttgttgtaaggtggggtggggggaattgctggtttcaccatttcagatctgtgttgtctaagagtattaacgttttaattaagcaaagaaatgatttttaatctgtatgtaattgttttaaagcacccattttaagagaaaatactgtgcaatgaagaaaccagtttaggcatttgctataaactgaaatattccaaaagaatcatctataacagccctgtaaattcctttaaaatgataactaacaggacagtttgaccaattttttttaaatatacttccttttatgtgttcaataatt

SEQ ID NO: 11196 - protein, 926 aa, Homo sapiens; identical to SEQ ID NO: 11190

SEQ ID NO: 11197 - DNA, 799 bp, Homo sapiens
caggctctgcctgttgactctttcacctgcctctgctctatatatttggtgactttcaaccatgtgaaaattagaaaatttaaacttcttcatgaggacgtgttggaacacctcattttatggcaccagaagtggtcaaaagagagccttacggaaagcctgtagacgtctgggggtgcggtgtgatcctttttatcctgctcagtggttgtttgcctttttacggaaccaaggaaagattgtttgaaggcattattaaaggaaaatataagatgaatccaaggcagtggagccatatctctgaaagtgccaaagacctagtacgtcgcatgctgatgctggatccagctgaaaggatcactgtttatgaagcactgaatcacccatggcttaaggtacatgagcattcacaggtcaccttctacactttgtctgaacacttccagtgacaggaatgcgttgctctatgagatggtcctttttaccttttcttttttctgagcagttttcattagtttttttcatcttgtttgctgttcctgcacatcatctgtgaacatctgaatagaagacataccatttgagtgtcatgcagctatcagagggtaaaaaacaggattaagacagaatatatcaggggaaggcctcttttttctctgccaacatgtgttccaaagatatgcaacatcaacaactgaagtaataccatgttataataaattaactatctttattttgggtgtgactgtgtgctttatagcattaactatttttcagtagatactaggtataaattttc

SEQ ID NO: 11198 - protein, 109 aa, Homo sapiens
MAPEVVKREPYGKPVDVWGCGVILFILLSGCLPFYGTKERLFEGIIKGKYKMNPRQWSHISESAKDLVRRMLMLDPAERITVYEALNHPWLKVHEHSQVTFYTLSEHFQ

SEQ ID NO: 11199 - DNA, 1830 bp, Homo sapiens
aaccaattgcaccacgaccggatggaagagcccagctgacacaaccaagacgagtctcagtgtctagggaagcttggggttctgctccttttacttcaggcgaacctgaactcagttaatgcaattttgaagcatgccctgaatagattcagtcattatcaagtcaaactaaaaacggtgaaaggttgcgactattaccaaataggaaaaatctgaagacataagaactacacatgaggaatatgtcatttagcactttcactttttgatctccacagaagacaatgagaagtcataccataacaatgacgacaacttcagtcagcagctggccttactcctcccacagaatgcgctttataaccaatcatagcgaccaaccgccacaaaacttctcagcaacaccaaatgttactacctgtcccatggatgaaaaattgctatctactgtgttaaccacatcctactctgttattttcatcgtgggactggttgggaacataatcgccctctatgtatttctgggtattcaccgtaaaagaaattccattcaaatttatctacttaacgtagccattgcagacctcctactcatcttctgcctccctttccgaataatgtatcatattaaccaaaacaagtggacactaggtgtgattctgtgcaaggttgtgggaacactgttttatatgaacaaagtatttatgtctgttgtatagtatggatgcttgctcttggtggattcctaactatgattattttaacacttaagaaaggagggcataattccacaatgtgtttccattacagagataagcataacgcaaaaggagaagccatttttaacttcattcttgtggtaatgttctggctaattttcttactaataatcctttcatatattaagattgggaagaatctattgaggatttctaaaaggaggtcaaaatttcctaattctggtaaatatgccactacagctcgtaactcctttattgtacttatcatttttactatatgttttgttccctatcatgcctttcgattcatctacatttcttcacagctaaatgtatcatcttgctactggaaagaaattgttcacaaaaccaatgagatcatgctggttctctcatctttcaatagttgcttagatccagtcatgtatttcctgatgtccagtaacattcgcaaaataatgtgccaacttctttttagacgatttcaaggtgaaccaagtaggagtgaaagcacttcagaatttaaaccaggatactccctgcatgatacatctgtggcagtgaaaatacagtctagttctaaaagtacttgaggtaaacatactaaaatgaattatataatgcagcctcttaattctttgaagaactaaaaaattaggaaacaaagttctagcatttacaaaactcagatctcaaagctctgcttgtatttgtgatatttcatttgcttaactgtaaaccatttcaaggtactaacttttaaatctgtatgtaaaatcttttcaaaatacatttttaagctaatactcttaacatagattatgaagttaagtgaaatttatggctctaacagcaaaataattaaagtgccatagtttctcaagtgactaaagtagttattaaaatcaagcacttgatactaatttgaagtgtgtttaaaagtaaatgatttgggaactgacaatgtgtcagaaaatatatgttcatttatcattttaaaatcttgtataatttgccactgtattcatttatgcctaaatctctataacagatgaaaagataattaataaaatcctaattaaaaaatgag

SEQ ID NO: 11200 - protein, 144 aa, Homo sapiens
MRSHTITMTTTSVSSWPYSSHRMRFITNHSDQPPQNFSATPNVTTCPMDEKLLSTVLTTSYSVIFIVGLVGNIIALYVFLGIHRKRNSIQIYLLNVAIADLLLIFCLPFRIMYHINQNKWTLGVILCKVVGTLFYMNKVFMSVV

SEQ ID NO: 11201 - DNA, 1927 bp, Homo sapiens
aaccaattgcaccacgaccggatggaagagcccagctgacacaaccaagacgagtctcagtgtctagggaagcttggggttctgctccttttacttcaggcgaacctgaactcagttaatgcaattttgaagcatgccctgaatagattcagtcattatcaagtcaaactaaaaacggtgaaaggttgcgactattaccaaataggaaaaatctgaagacataagaactacacatgaggaatatgtcatttagcactttcactttttgatctccacagaagacaatgagaagtcataccataacaatgacgacaacttcagtcagcagctggccttactcctcccacagaatgcgctttataaccaatcatagcgaccaaccgccacaaaacttctcagcaacaccaaatgttactacctgtcccatggatgaaaaattgctatctactgtgttaaccacatcctactctgttattttcatcgtgggactggttgggaacataatcgccctctatgtatttctgggtattcaccgtaaaagaaattccattcaaatttatctacttaacgtagccattgcagacctcctactcatcttctgcctccctttccgaataatgtatcatattaaccaaaacaagtggacactaggtgtgattctgtgcaaggttgtgggaacactgttttatatgaacatgtacattagcattattttgcttggattcatcagtttggatcgctatataaaaattaatcggtctatacagcaacggaaggcaataacaaccaaacaaagtatttatgtctgttgtatagtatggatgcttgctcttggtggattcctaactatgattattttaacacttaagaaaggagggcataattccacaatgtgtttccattacagagataagcataacgcaaaaggagaagccatttttaacttcattcttgtggtaatgttctggctaattttcttactaataatcctttcatatattaagattgggaagaatctattgaggatttctaaaaggaggtcaaaatttcctaattctggtaaatatgccactacagctcgtaactcctttattgtacttatcatttttactatatgttttgttccctatcatgcctttcgattcatctacatttcttcacagctaaatgtatcatcttgctactggaaagaaattgttcacaaaaccaatgagatcatgctggttctctcatctttcaatagttgcttagatccagtcatgtatttcctgatgtccagtaacattcgcaaaataatgtgccaacttctttttagacgatttcaaggtgaaccaagtaggagtgaaagcacttcagaatttaaaccaggatactccctgcatgatacatctgtggcagtgaaaatacagtctagttctaaaagtacttgaggtaaacatactaaaatgaattatataatgcagcctcttaattctttgaagaactaaaaaattaggaaacaaagttctagcatttacaaaactcagatctcaaagctctgcttgtatttgtgatatttcatttgcttaactgtaaaccatttcaaggtactaacttttaaatctgtatgtaaaatcttttcaaaatacatttttaagctaatactcttaacatagattatgaagttaagtgaaatttatggctctaacagcaaaataattaaagtgccatagtttctcaagtgactaaagtagttattaaaatcaagcacttgatactaatttgaagtgtgtttaaaagtaaatgatttgggaactgacaatgtgtcagaaaatatatgttcatttatcattttaaaatcttgtataatttgccactgtattcatttatgcctaaatctctataacagatgaaaagataattaataaaatcctaattaaaaaatgag

SEQ ID NO: 11202 - protein, 381 aa, Homo sapiens; identical to SEQ ID NO: 1779

SEQ ID NO: 11203 - DNA, 1821 bp, Homo sapiens
agctgacacaaccaagacgagtctcagtgtctagggaagcttggggttctgctccttttacttcaggcgaacctgaactcagttaatgcaattttgaagcatgccctgaatagattcagtcattatcaagtcaaactaaaaacggtgaaaggttgcgactattaccaaatagaagacaatgagaagtcataccataacaatgacgacaacttcagtcagcagctggccttactcctcccacagaatgcgctttataaccaatcatagcgaccaaccgccacaaaacttctcagcaacaccaaatgttactacctgtcccatggatgaaaaattgctatctactgtgttaaccacatcctactctgttattttcatcgtgggactggttgggaacataatcgccctctatgtatttctgggtattcaccgtaaaagaaattccattcaaatttatctacttaacgtagccattgcagacctcctactcatcttctgcctccctttccgaataatgtatcatattaaccaaaacaagtggacactaggtgtgattctgtgcaaggttgtgggaacactgttttatatgaacatgtacattagcattattttgcttggattcatcagtttggatcgctatataaaaattaatcggtctatacagcaacggaaggcaataacaaccaaacaaagtatttatgtctgttgtatagtatggatgcttgctcttggtggattcctaactatgattattttaacacttaagaaaggagggcataattccacaatgtgtttccattacagagataagcataacgcaaaaggagaagccatttttaacttcattcttgtggtaatgttctggctaattttcttactaataatcctttcatatattaagattgggaagaatctattgaggatttctaaaaggaggtcaaaatttcctaattctggtaaatatgccactacagctcgtaactcctttattgtacttatcatttttactatatgttttgttccctatcatgcctttcgattcatctacatttcttcacagctaaatgtatcatcttgctactggaaagaaattgttcacaaaaccaatgagatcatgctggttctctcatctttcaatagttgcttagatccagtcatgtatttcctgatgtccagtaacattcgcaaaataatgtgccaacttctttttagacgatttcaaggtgaaccaagtaggagtgaaagcacttcagaatttaaaccaggatactccctgcatgatacatctgtggcagtgaaaatacagtctagttctaaaagtacttgaggtaaacatactaaaatgaattatataatgcagcctcttaattctttgaagaactaaaaaattaggaaacaaagttctagcatttacaaaactcagatctcaaagctctgcttgtatttgtgatatttcatttgcttaactgtaaaccatttcaaggtactaacttttaaatctgtatgtaaaatcttttcaaaatacatttttaagctaatactcttaacatagattatgaagttaagtgaaatttatggctctaacagcaaaataattaaagtgccatagtttctcaagtgactaaagtagttattaaaatcaagcacttgatactaatttgaagtgtgtttaaaagtaaatgatttgggaactgacaatgtgtcagaaaatatatgttcatttatcattttaaaatcttgtataatttgccactgtattcatttatgcctaaatctctataacagatgaaaagataattaataaaatcctaattaaaaaatgag

SEQ ID NO: 11204 - protein, 381 aa, Homo sapiens; identical to SEQ ID NO: 1779

SEQ ID NO: 11205 - DNA, 2005 bp, Homo sapiens
acaaccaagacgagtctcagtgtctagggaagcttggggttctgctccttttacttcaggcgaacctgaactcagttaatgcaattttgaagcatgccctgaatagattcagtcattatcaagtcaaactaaaaacggtgaaaggttgcgactattaccaaatagactctcgctctgttgcccaggctagagtacagtggcatgaacacagctcactgcagcctctgtctcccgggttcaagcaattctccagcctcagcctccggagtagctgggactacaggaaaaatctgaagacataagaactacacatgaggaatatgtcatttagcactttcactttttgatctccacagaagacaatgagaagtcataccataacaatgacgacaacttcagtcagcagctggccttactcctcccacagaatgcgctttataaccaatcatagcgaccaaccgccacaaaacttctcagcaacaccaaatgttactacctgtcccatggatgaaaaattgctatctactgtgttaaccacatcctactctgttattttcatcgtgggactggttgggaacataatcgccctctatgtatttctgggtattcaccgtaaaagaaattccattcaaatttatctacttaacgtagccattgcagacctcctactcatcttctgcctccctttccgaataatgtatcatattaaccaaaacaagtggacactaggtgtgattctgtgcaaggttgtgggaacactgttttatatgaacatgtacattagcattattttgcttggattcatcagtttggatcgctatataaaaattaatcggtctatacagcaacggaaggcaataacaaccaaacaaagtatttatgtctgttgtatagtatggatgcttgctcttggtggattcctaactatgattattttaacacttaagaaaggagggcataattccacaatgtgtttccattacagagataagcataacgcaaaaggagaagccatttttaacttcattcttgtggtaatgttctggctaattttcttactaataatcctttcatatattaagattgggaagaatctattgaggatttctaaaaggaggtcaaaatttcctaattctggtaaatatgccactacagctcgtaactcctttattgtacttatcatttttactatatgttttgttccctatcatgcctttcgattcatctacatttcttcacagctaaatgtatcatcttgctactggaaagaaattgttcacaaaaccaatgagatcatgctggttctctcatctttcaatagttgcttagatccagtcatgtatttcctgatgtccagtaacattcgcaaaataatgtgccaacttctttttagacgatttcaaggtgaaccaagtaggagtgaaagcacttcagaatttaaaccaggatactccctgcatgatacatctgtggcagtgaaaatacagtctagttctaaaagtacttgaggtaaacatactaaaatgaattatataatgcagcctcttaattctttgaagaactaaaaaattaggaaacaaagttctagcatttacaaaactcagatctcaaagctctgcttgtatttgtgatatttcatttgcttaactgtaaaccatttcaaggtactaacttttaaatctgtatgtaaaatcttttcaaaatacatttttaagctaatactcttaacatagattatgaagttaagtgaaatttatggctctaacagcaaaataattaaagtgccatagtttctcaagtgactaaagtagttattaaaatcaagcacttgatactaatttgaagtgtgtttaaaagtaaatgatttgggaactgacaatgtgtcagaaaatatatgttcatttatcattttaaaatcttgtataatttgccactgtattcatttatgcctaaatctctataacagatgaaaagataattaataaaatcctaattaaaaaatgag

SEQ ID NO: 11206 - protein, 30 aa, Homo sapiens
MNTAHCSLCLPGSSNSPASASGVAGTTGKI

SEQ ID NO: 11207 - DNA, 1944 bp, Homo sapiens
cagttaatgcaattttgaagcatgccctgaatagattcagtcattatcaagtcaaactaaaaacggtgaaaggttgcgactattaccaaatagcattctcatctccagggtaacgtgcctatttccttcaacttgcttctttgacatgatttgagttcttctctccatttggtccatggccttttctaagtgtgctgctgtggatcaaacactgcattccaggaaaaatctgaagacataagaactacacatgaggaatatgtcatttagcactttcactttttgatctccacagaagacaatgagaagtcataccataacaatgacgacaacttcagtcagcagctggccttactcctcccacagaatgcgctttataaccaatcatagcgaccaaccgccacaaaacttctcagcaacaccaaatgttactacctgtcccatggatgaaaaattgctatctactgtgttaaccacatcctactctgttattttcatcgtgggactggttgggaacataatcgccctctatgtatttctgggtattcaccgtaaaagaaattccattcaaatttatctacttaacgtagccattgcagacctcctactcatcttctgcctccctttccgaataatgtatcatattaaccaaaacaagtggacactaggtgtgattctgtgcaaggttgtgggaacactgttttatatgaacatgtacattagcattattttgcttggattcatcagtttggatcgctatataaaaattaatcggtctatacagcaacggaaggcaataacaaccaaacaaagtatttatgtctgttgtatagtatggatgcttgctcttggtggattcctaactatgattattttaacacttaagaaaggagggcataattccacaatgtgtttccattacagagataagcataacgcaaaaggagaagccatttttaacttcattcttgtggtaatgttctggctaattttcttactaataatcctttcatatattaagattgggaagaatctattgaggatttctaaaaggaggtcaaaatttcctaattctggtaaatatgccactacagctcgtaactcctttattgtacttatcatttttactatatgttttgttccctatcatgcctttcgattcatctacatttcttcacagctaaatgtatcatcttgctactggaaagaaattgttcacaaaaccaatgagatcatgctggttctctcatctttcaatagttgcttagatccagtcatgtatttcctgatgtccagtaacattcgcaaaataatgtgccaacttctttttagacgatttcaaggtgaaccaagtaggagtgaaagcacttcagaatttaaaccaggatactccctgcatgatacatctgtggcagtgaaaatacagtctagttctaaaagtacttgaggtaaacatactaaaatgaattatataatgcagcctcttaattctttgaagaactaaaaaattaggaaacaaagttctagcatttacaaaactcagatctcaaagctctgcttgtatttgtgatatttcatttgcttaactgtaaaccatttcaaggtactaacttttaaatctgtatgtaaaatcttttcaaaatacatttttaagctaatactcttaacatagattatgaagttaagtgaaatttatggctctaacagcaaaataattaaagtgccatagtttctcaagtgactaaagtagttattaaaatcaagcacttgatactaatttgaagtgtgtttaaaagtaaatgatttgggaactgacaatgtgtcagaaaatatatgttcatttatcattttaaaatcttgtataatttgccactgtattcatttatgcctaaatctctataacagatgaaaagataattaataaaatcctaattaaaaaatgag

SEQ ID NO: 11208 - protein, 381 aa, Homo sapiens; identical to SEQ ID NO: 1779

SEQ ID NO: 11209 - DNA, 1745 bp, Homo sapiens
cagttaatgcaattttgaagcatgccctgaatagattcagtcattatcaagtcaaactaaaaacggtgaaaggttgcgactattaccaaataggaaaaatctgaagacataagaactacacatgaggaatatgtcatttagcactttcactttttgatctccacagaagacaatgagaagtcataccataacaatgacgacaacttcagtcagcagctggcaccaaatgttactacctgtcccatggatgaaaaattgctatctactgtgttaaccacatcctactctgttattttcatcgtgggactggttgggaacataatcgccctctatgtatttctgggtattcaccgtaaaagaaattccattcaaatttatctacttaacgtagccattgcagacctcctactcatcttctgcctccctttccgaataatgtatcatattaaccaaaacaagtggacactaggtgtgattctgtgcaaggttgtgggaacactgttttatatgaacatgtacattagcattattttgcttggattcatcagtttggatcgctatataaaaattaatcggtctatacagcaacggaaggcaataacaaccaaacaaagtatttatgtctgttgtatagtatggatgcttgctcttggtggattcctaactatgattattttaacacttaagaaaggagggcataattccacaatgtgtttccattacagagataagcataacgcaaaaggagaagccatttttaacttcattcttgtggtaatgttctggctaattttcttactaataatcctttcatatattaagattgggaagaatctattgaggatttctaaaaggaggtcaaaatttcctaattctggtaaatatgccactacagctcgtaactcctttattgtacttatcatttttactatatgttttgttccctatcatgcctttcgattcatctacatttcttcacagctaaatgtatcatcttgctactggaaagaaattgttcacaaaaccaatgagatcatgctggttctctcatctttcaatagttgcttagatccagtcatgtatttcctgatgtccagtaacattcgcaaaataatgtgccaacttctttttagacgatttcaaggtgaaccaagtaggagtgaaagcacttcagaatttaaaccaggatactccctgcatgatacatctgtggcagtgaaaatacagtctagttctaaaagtacttgaggtaaacatactaaaatgaattatataatgcagcctcttaattctttgaagaactaaaaaattaggaaacaaagttctagcatttacaaaactcagatctcaaagctctgcttgtatttgtgatatttcatttgcttaactgtaaaccatttcaaggtactaacttttaaatctgtatgtaaaatcttttcaaaatacatttttaagctaatactcttaacatagattatgaagttaagtgaaatttatggctctaacagcaaaataattaaagtgccatagtttctcaagtgactaaagtagttattaaaatcaagcacttgatactaatttgaagtgtgtttaaaagtaaatgatttgggaactgacaatgtgtcagaaaatatatgttcatttatcattttaaaatcttgtataatttgccactgtattcatttatgcctaaatctctataacagatgaaaagataattaataaaatcctaattaaaaaatgag

SEQ ID NO: 11210 - protein, 33 aa, Homo sapiens
MRSHTITMTTTSVSSWHQMLLPVPWMKNCYLLC

SEQ ID NO: 11211 - DNA, 3213 bp, Homo sapiens
agttggtgtcatgcaagaatctattcacactgactaaagatattggaagagtgaagatcagagaattttaagtctgaaatttggcatcactgccctgaacaatataaccttagttggcataaactactcatacagacaaaggcattatccatcacaataagtaactttttgtctttatttcaaccggacaatcgtgattagaaaagctcctgtgacaaaattcaagaaaacctgacataaatgaacaacaatacaacatgtattcaaccatctatgatctcttccatggctttaccaatcatttacatcctcctttgtattgttggtgtttttggaaacactctctctcaatggatatttttaacaaaaataggtaaaaaaacatcaacgcacatctacctgtcacaccttgtgactgcaaacttacttgtgtgcagtgccatgcctttcatgagtatctatttcctgaaaggtttccaatgggaatatcaatctgctcaatgcagagtggtcaattttctgggaactctatccatgcatgcaagtatgtttgtcagtctcttaattttaagttggattgccataagccgctatgctaccttaatgcaaaaggattcctcgcaagagactacttcatgctatgagaaaatattttatggccatttactgaaaaaatttcgccagcccaactttgctagaaaactatgcatttacatatggggagttgtactgggcataatcattccagttaccgtatactactcagtcatagaggctacagaaggagaagagagcctatgctacaatcggcagatggaactaggagccatgatctctcagattgcaggtctcattggaaccacatttattggattttcctttttagtagtactaacatcatactactcttttgtaagccatctgagaaaaataagaacctgtacgtccattatggagaaagatttgacttacagttctgtgaaaagacatcttttggtcatccagattctactaatagtttgcttccttccttatagtatttttaaacccattttttatgttctacaccaaagagataactgtcagcaattgaattatttaatagaaacaaaaaacattctcacctgtcttgcttcggccagaagtagcacagaccccattatatttcttttattagataaaacattcaagaagacactatataatctctttacaaagtctaattcagcacatatgcaatcatatggttgacttttgaatggaaaaccccacaatattaagaaaagcattcatgtgactttattagggacactaaactacatcattaacatgtcacagcttggttgacaataatcaccaagaaaatctctttggtttttaaaaataaataaacatatattcataaaactcaaaaaacagttatactgaacgttgagatggcagaaactttcagaagcaaaaattaagcatattgaaaggatcccactcatatgaaactaacaggctgttttctgtttaaactcaactgtcagtgcttctgttcagaacacgttatttcatgactaggataaagaagcaaatggtttatgacttgtctgctttctggtagttagaatacaagggtcaatctatggctagtgtttattggtaattttaaaatctttaaaaataagtagctgggcacagtggcttacgcctgtaatcccagcactttgggaggctgaggcaggagaatcgcttgagcccgggacggaggttgcagtgagcggagatcgtgccactgcactacagcctgggaggcagagcgagactctgtctcataaaacaaaacaaaaaaataaaaataagtaaaaaaataaataagaaatatcctcattcacatcttacctaaatgcatgaataatacagtgaaaaaaatccaaggttttataaacatattatttatttgaaattatctggctcatgttattggggagaagcaatattcattgactatatttttaaagcagatgatacttataaaaatgcttaaatatttggattaggctttgtcaaagtaaaaagctatgtcattatatgcccatcttcatcacattgtgcatattttcttctgtattcaatataaataatgttattagtgacaaacagtacctggcagttaattttttgtgaaataaatgaatgaataataagggagtgtaatagtattgcagttaagagattgatctctgaagttatacttcttgggttcaatctggctctactttttatttagctggacaatcttaggcaaattaacttatcctctgtacgtgttaatttcttcatttgtagagcagaaaatactatcttatttacagatcctattattaaatcagctgttactattatgagtagctaacgcttagtaagcacttgctgtttgccaagcattctacttatatgctttacatatattattttaatcaccacaactctaaagtatactaatttactgatgaaaatattgaagtgggctgggtgcggtggctcatgcctgtaatcccagcactctgggaggccgaggtgggcagatcacctgaggtcaggagttcgagactagcctggccaacatggcgaaacccacctctactaaaaatacaaaaattagctgggcgtggtggtgtgtgcctgtagtcccagctacttgggaggctgaggcagaagaatcacttgaactcgggaggctgaggcaggagaatcacttgaactcaggaggcggaggttgcagtgagccaagatcatgccattgcactccagcctgggcgacagagtgagactctgtctcaaaaaaaaaaaaaaaaaaaaaaaaaaaaaaaaatatatatatatatatatatatatatgtatgtatgtatgtatatgtgcatagttaagtaaatcaccccaattttttctaatatttaagtgaacatttaaagataagcatttcttaatgttaatttcttttctttcatgtaatcttgtcagtagacaaatgatggtgactatattctgtaataagtacatatattatgattaaaaaaaaaagcgtgtactatctgcccaaagagatcataagcactttggagctataaacttcttgtctatttctacttccatggtactgatattctcttctcagataaccaaacaaaaacagctgaataaaatcaaccattaatagtaacttgc

SEQ ID NO: 11212 - protein, 336 aa, Homo sapiens; identical to SEQ ID NO: 1781

SEQ ID NO: 11213 - DNA, 1944 bp, Homo sapiens
acactgactaaagatattggaagagtgaagatcagagaattttaagtctgaaatttggcatcactgccctgaacaatataaccttagttggcataaactactcatacagacaaaggcattatccatcacaataagtaactttttgtctttatttcaaccggacaatcgtgattagaaaagctcctgtgacaaaattcaagaaaacctgacataaatgaacaacaatacaacatgtattcaaccatctatgatctcttccatggctttaccaatcatttacatcctcctttgtattgttggtgtttttggaaacactctctctcaatggatatttttaacaaaaataggtaaaaaaacatcaacgcacatctacctgtcacaccttgtgactgcaaacttacttgtgtgcagtgccatgcctttcatgagtatctatttcctgaaaggtttccaatgggaatatcaatctgctcaatgcagagtggtcaattttctgggaactctatccatgcatgcaagtatgtttgtcagtctcttaattttaagttggattgccataagccgctatgctaccttaatgcaaaaggattcctcgcaagagactacttcatgctatgagaaaatattttatggccatttactgaaaaaatttcgccagcccaactttgctagaaaactatgcatttacatatggggagttgtactgggcataatcattccagttaccgtatactactcagtcatagaggctacagaaggagaagagagcctatgctacaatcggcagatggaactaggagccatgatctctcagattgcaggtctcattggaaccacatttattggattttcctttttagtagtactaacatcatactactcttttgtaagccatctgagaaaaataagaacctgtacgtccattatggagaaagatttgacttacagttctgtgaaaagacatcttttggtcatccagattctactaatagtttgcttccttccttatagtatttttaaacccattttttatgttctacaccaaagagataactgtcagcaattgaattatttaatagaaacaaaaaacattctcacctgtcttgcttcggccagaagtagcacagaccccattatatttcttttattagataaaacattcaagaagacactatataatctctttacaaagtctaattcagcacatatgcaatcatatggttgacttttgaatggaaaaccccacaatattaagaaaagcattcatgtgactttattagggacactaaactacatcattaacatgtcacagcttggttgacaataatcaccaagaaaatctctttggtttttaaaaataaataaacatatattcataaaactcaaaaaacagttatactgaacgttgagatggcagaaactttcagaagcaaaaattaagcatattgaaaggatcccactcatatgaaactaacaggctgttttctgtttaaactcaactgtcagtgcttctgttcagaacacgttatttcatgactaggataaagaagcaaatggtttatgacttgtctgctttctggtagttagaatacaagggtcaatctatggctagtgtttattggtaattttaaaatctttaaaaataagtagctgggcacagtggcttacgcctgtaatcccagcactttgggaggctgaggtgggtggatcattttgaggtcaggagttcaagaccagcctgggcaacatggtgaaaccctgtctctactaaaaatacaaaaatcagctggacatggtggtgggcgcctgtaatcccagctactcgggaggctgaggcaggagaatcgcttgagcccgggacggaggttgcagtgagcggagatcgtgccactgcactacagcctgggaggcagagcgagactctgtctcataaaacaaaacaaa

SEQ ID NO: 11214 - protein, 336 aa, Homo sapiens; identical to SEQ ID NO: 1781

SEQ ID NO: 11215 - DNA, 563 bp, Homo sapiens
gattattataaatttatcttgtgtttctaactgctatacttctctttgcccagcctactcctacaaaaaaagaaatcaactccttggttttaagtttctcagcctgagcaacataagtgagactccatctcaaaaaaaaaaaaaattcttttgcttattagaagtgaatccttttactgttcctctccttctgagccaggagtagcgtgtgtgatatagccagaggtttttctgtcaggtgcaactatagctgtagtaactcttcccagtgttatcaattccatttgagtgtaggggccatcagaggaaggtttgtggcattaggctgctggattgaaatgcttatgcttagcagattaccagtgttccctctgttctccctttgtggtttgccggcaggatttcctttcaccttgtcttcccagatttgcccgtaactcccaccctgacagagcacaaggccagtgataggcctagagtcctcagcaaattgaacagaatgggccatcttcctcttctatccagggagtagaaacttacttccctgttaagttgtttatcct

SEQ ID NO: 11216 - protein, 32 aa, Homo sapiens
MLMLSRLPVFPLFSLCGLPAGFPFTLSSQICP

SEQ ID NO: 11217 - DNA, 684 bp, Homo sapiens
cccgccgcccgcgccggggcggtcgcctgcagaggaaggcgccgcagtctctgggcctcgcggccccactcgagcgtcctcggcaccgagggctcgcgggtcctgaggggaggaggcgatcccggggctgggcactgagctcttgggcgcccccacccccgttttcgaagccctccacgctgcggccgctatcccctccggaccatggccgacgacgacgtgctgttcgaggatgtgtacgagctgtgcgaggtgatcggaaagggtcccttcagtgttgtacgacgatgtatcaacagagaaactgggcaacaatttgctgtaaaaattgttgatgtagccaagttcacatcaagtccagggttaagtacagaagatctaaagcgggaagccagtatctgtcatatgctgaaacatccacacattgtagagttattggagacatatagctcagatggaatgctttacatggttttcgaatttatggatggagcagatctgtgttttgaaatcgtaaagcgagctgacgctggttttgtgtacagtgaagctgtagccagcatcttagacaaacatagctggaaacaacttggagaccaccttaatacagctttgagctcagcatgacttgaatgtcttcaaattcattgccctgactccttctggctgaagagcaagggacct

SEQ ID NO: 11218 - protein, 140 aa, Homo sapiens
MADDDVLFEDVYELCEVIGKGPFSVVRRCINRETGQQFAVKIVDVAKFTSSPGLSTEDLKREASICHMLKHPHIVELLETYSSDGMLYMVFEFMDGADLCFEIVKRADAGFVYSEAVASILDKHSWKQLGDHLNTALSSA

SEQ ID NO: 11219 - DNA, 632 bp, Homo sapiens
gacgacgacgtgctgttcgaggatgtgtacgagctgtgcgaggtgatcggaaagggtcccttcagtgttgtacgacgatgtatcaacagagaaactgggcaacaatttgctgtaaaaattgttgatgtagccaagttcacatcaagtccagggttaagtacagaagatctaaagcgggaagccagtatctgtcatatgctgaaacatccacacattgtagagttattggagacatatagctcagatggaatgctttacatggttttcgaattgtgagtgtgtattttaattcttaaagggtaaaacttgaagcaatgttggtgttggataatgctaacacttttctcttgaaatttagcagtagttgtgaacttatctgttcagaaagacctaaagtcacaagaaaaaaggattatgtcatcataaggtttacagtggcaaaggaagcaaaagctgggcatattcagttactcttcatgctttcagcatgcttcagagaagagactccaaaaggaaattgagttcagaggaataggaggaccccaaactataaacttctgaccagtagaagtcttagtgaagaagagtaggatgaaagtggaggcatccatgtagcaagactcttggcaact

SEQ ID NO: 11220 - protein, 68 aa, Homo sapiens [sequence omitted]

SEQ ID NO: 11221 - DNA, 679 bp, Homo sapiens
gcaacagcggcgggtgcaccggcagcagcgacgaccctgcgcgcaggtggcagtgtagaagccagaccgggagcttccagaagtggtttctgaaagagtcaaatgtacatgagtaagcaagcacaggaatctgaaaaaccacagttcttgaggttgggaagtccaagatcaaggcactaacatttggtatctggtgaggaccttcttgctgtgtcctaacatgatggaaggtggaagggcaaaagagatgaactatccttacatggcagaagagcagaagagaagaccccactccctcaagtgcttttataagagccataatcccatccatgaggactctgccattatgacttaatcactgcctaaaaccccacctcttaatgttattacattggagattaagtttcagtatacaaatttggggggatgcaatcagatcacagcagttaccaatggccaatgatgtaatcaattgtgtatgtaataaaacttccatataacccccagaattacagagttctgatggcttctgggttggtgaacacatggagatattaaggggatggcattccaggaggctgcatggaagcccctcatcctttcccacatactttgccttatatatcttttccatttggctgttcctgacttgtacccgttataataaaccattaatatt

SEQ ID NO: 11222 - protein, 44 aa, Homo sapiens [sequence omitted]

SEQ ID NO: 11223 - DNA, 2009 bp, Homo sapiens
acagtccacacccagcaaccatcaggacgccccctgctcccggcccgaagactgtagggaccatgggaggagagagtggtggctggaccggtcggggcgtgtgcgcggaaggctggagttgcttgagtattgtctgccggggccggcgcttgcgtcagggtgctccctcgcgctttcgggggtagggaatgggtttgctgaacttactctgagggctgatactgcacatgcccttggcgccttgtgcatgtttggacaagggtttaatggaggcacgtgggagcagtatcgatctctggcgggtccccaaagaccctcttgggatagtccagagcgtgttcggggttgagagcgaaaggagagtgttccgtgtgaatgtgcgtcctagggaggaggaggacagtgtctcaaggagacttgattttcttttatttgctgcaattccgtaaaccaaatcatgctttcgaggcgttaaagtaaattactggtaagtggggcggatctctgctggggataaagaagctcccgggtttgcggggtagcgggcctggctggcgtgcacgctcggtggcttttggcgctgtctcgcctaggtagtgggggtggaggtggtggtgcttgtgtctttggcttaaggtgctggagccgggcttacttgtcctaggtagactgtgggacttggaggaggtaaaaaagcttcgcggcgcggttattcgcaattaactccagaaatctcagtgtgtgtctgtcggtcggtctctctctgtctctgtctctctctctctctctctgtctctgtctctctctctctctctcacacacacacacacacacacacacacacacacacacacactcgcacgtctcatggctgcttggatttgccgatagttgttcatgaatttttattcctgtttgttcatttcctgacttttttttttttttttttggaaaaaggacctacctgtattaaaatccgtggggtttcagaaagacccttccgcagtcattcatattcaaatcaaggatagggcattttgatgaaaataccccaccaaactgctgtttggattggacaaaactgtagttcaggttagaattactgttattttaaatagacatcttacaaccttgtggtaaagtaaccttagcctgaatcgcccctgatctttctttgtgtcaatttacagaattctgaattacagatgaacaaagcggtgaagttttcttttaattttaaacgacaggtcttgaaatggctgtaagttgagttctgcgactccatctctttaatgatcggctcagagtggtgtatagttgatgatctgagacttacatatgtttcaatttctaatcaaataatttatcataccattggggagaaggacgccttaggaattttcaacacagaggagaaagaacatttttgtcttttggagcaaatgttttgccactttttccccagatgtccccgttagatgcctagaaaagatgcattgttgacgaataatacatgatttatttctcttttatgtctacaggtggcagtgtagaagccagaccgggagcttccagaagtggtttctgaaagagtcaaatgtacatgagtaagcaagcacaggaatctgaaaaaccacaggcccactaatttgcctgcttgactaaaataaggacgagttatgtgctgatgagagacatgtttgtaatgttattcgttgtgacacagttcaaaagaatttgcctttgattctcactaaaatgtaaagttttgcatattaagatcctttttcaacaactgagcaactctttataatgaagggcagaagacgccaaagggaagaaaatatttacctttgtgggcttttactttctttcctgggaatggtaggccatagctattggtatgtttttttttgttgttgttgttgttgttgttgttttttgagaaggagtctctgatcatgccactgcactccagcctgggtgtgacagtgagatcccttcttaag

SEQ ID NO: 11224 - protein, 73 aa, Homo sapiens [sequence omitted]

SEQ ID NO: 11225 - DNA, 373 bp, Homo sapiens
gggaaatgaggaccaccgctccggggcgcgagtaggcgcgtggagtccgggggctcagccgccgcgcctcttcctcctgcagctggagactgcaacagcggcgggtgcaccggcagcagcgacgaccctgcgcgcaggtggcagtgtagaagccagaccgggagcttccagaagtggtttctgaaagagtcaaatgtacatgagtaagcaagcacaggaatctgaaaaaccacaggcccactaatttgcctgcttgactaaaataaggacgagttatgtgctgatgagagacatgtttgtaatgttattcgttgtgacacagttcaaaagaatttgcctttgattctcactaaaatgtaaagttttgcatatt

SEQ ID NO: 11226 - protein, 65 aa, Homo sapiens
GPPLRGASRRVESGGSAAAPLPPAAGDCNSGGCTGSSDDPARRWQCRSQTGSFQKWFLKESNVHE

SEQ ID NO: 11227 - DNA, 554 bp, Homo sapiens
caggaacacagactggaaagatacacacaaaattcaggatggtaaaagaagaaagatcgggacagagacctgcttggagatttctcatactcatccttagatctgctttgagaacaagaacaggagcccagatcagatttgggcatagatttgctccttgagctagatttcctgccttttgaacgagaacgtgatcgacctttgctccgcaacctgatcaggagtgactttttgagatacttcgagatctactgtggctgctcctgcgactcctacttcgtgaccatcttctagatctatacctggatctgcttccagaatcagatcgcctatggcttgtgcctggcttaccttcaataagcctaatatttctgcaccatccagtttgtccaaagcaagcttcatgtcaaaataggagtgaaactcaacgccctcacttgtgcattccttgtgagcatcaacataggttacttcatctgcttgttgcataaaatcctttaaatcttgccaactgtaacaactagaaagactttctataataagctcgtattctg

SEQ ID NO: 11228 - protein, 40 aa, Homo sapiens [sequence omitted]

SEQ ID NO: 11229 - DNA, 845 bp, Homo sapiens
aacacagactggaaagatacacacaaaattcaggatggtaaaagaagaaaggagattcctcttgcaaaagaagccaagtataaacatggaagaacaactgcctaagcaagtagaaaagtgttccataatagtgcgcaatgaatgaagagttctggattaatctctggaactcaacctgcaccctgatctttattttgaatgggatctagaacgggatcttgaagtagctctttttggcggaggggacacagaatgaccctttgagggtggagcaggtaggggtgaattggaacgagactggctccttgatctgtattttgacttcatatcaccttttccattttctttggaagatcgggacagagacctgcttggagatttctcatactcatccttagatctgctttgagaacaagaacaggagcccagatcagatttgggcatagatttgctccttgagctagatttcctgccttttgaacgagaacgtgatcgacctttgctccgcaacctgatcaggagtgactttttgagatacttcgagatctactgtggctgctcctgcgactcctacttcgtgaccatcttctagatctatacctggatctgcttccagaatcagatcgcctatggcttgtgcctggcttaccttcaataagcctaatatttctgcaccatccagtttgtccaaagcaagcttcatgtcaaaataggagtgaaactcaacgccctcacttgtgcattccttgtgagcatcaacataggttacttcatctgcttgttgcataaaatcctttaaatcttgccaactgtaacaactagaaagactttctataataagctcg

SEQ ID NO: 11230 - protein, 36 aa, Homo sapiens
MVKEERRFLLQKKPSINMEEQLPKQVEKCSIIVRNE

SEQ ID NO: 11231 - DNA, 387 bp, Homo sapiens
atggagagaaaccctacaaatttgaagaatgtggcaaagtctttaaccagtcgtcaatccttactacacaagataattcataccagagaaaaattcaacaaatataaagaatgtggcaaagattttaaccaaccctcatacattactgaacatgagaaaattcatactggggagaaactctccaaagataagagaagtcatactggagagaaaccctaccaatgtgaagaatatggcaaaacttttaaccaatactcaagccttactggacataagaaaattcatgttggtgagaaactccacaaacctaaaagatgtaacaatgattttgacaacacctcaaacttttctaaacataaaagaaattgtattggtgagaaatcttag

SEQ ID NO: 11232 - protein, 128 aa, Homo sapiens
MERNPTNLKNVAKSLTSRQSLLHKIIHTREKFNKYKECGKDFNQPSYITEHEKIHTGEKLSKDKRSHTGEKPYQCEEYGKTFNQYSSLTGHKKIHVGEKLHKPKRCNNDFDNTSNFSKHKRNCIGEKS

SEQ ID NO: 11233 - DNA, 1815 bp, Homo sapiens
ggcggcggcggcggcgaggcgggagctgtagccccctacggctacactcggccccctcaggggctggcgggccaggaaagcgacttcaccgcacctgatgtgtggtaccctggcggcatggtgagcagagtgccctatcccagtcccacttgtgtcaaaagcgaaatgggcccctggatggatagctactccggaccttacggggacatgcgtttggagactgccagggaccatgttttgcccattgactattactttccaccccagaagacctgcctgatctgtggagatgaagcttctgggtgtcactatggagctctcacatgtggaagctgcaaggtcttcttcaaaagagccgctgaagggaaacagaagtacctgtgcgccagcagaaatgattgcactattgataaattccgaaggaaaaattgtccatcttgtcgtcttcggaaatgttatgaagcagggatgactctgggagcccggaagctgaagaaacttggtaatctgaaactacaggaggaaggagaggcttccagcaccaccagccccactgaggagacaacccagaagctgacagtgtcacacattgaaggctatgaatgtcagcccatctttctgaatgtcctggaagccattgagccaggtgtagtgtgtgctggacacgacaacaaccagcccgactcctttgcagccttgctctctagcctcaatgaactgggagagagacagcttgtacacgtggtcaagtgggccaaggccttgcctggcttccgcaacttacacgtggacgaccagatggctgtcattcagtactcctggatggggctcatggtgtttgccatgggctggcgatccttcaccaatgtcaactccaggatgctctacttcgcccctgatctggttttcaatgagtaccgcatgcacaagtcccggatgtacagccagtgtgtccgaatgaggcacctctctcaagagtttggatggctccaaatcaccccccaggaattcctgtgcatgaaagcactgctactcttcagcattattccagtggatgggctgaaaaatcaaaaattctttgatgaacttcgaatgaactacatcaaggaactcgatcgtatcattgcatgcaaaagaaaaaatcccacatcctgctcaagacgcttctaccagctcaccaagctcctggactccgtgcagcctattgcgagagagctgcatcagttcacttttgacctgctaatcaagtcacacatggtgagcgtggactttccggaaatgatggcagagatcatctctgtgcaagtgcccaagatcctttctgggaaagtcaagcccatctatttccacacccagtgaagcattggaaaccctatttccccaccccagctcatgccccctttcagatgtcttctgcctgttataactctgcactactcctctgcagtgccttggggaatttcctctattgatgtacagtctgtcatgaacatgttcctgaattctatttgctgggctttttttttctctttctctcctttctttttcttcttccctccctatctaaccctcccatggcaccttcagactttgcttcccattgtggctcctatctgtgttttgaatggtgttgtatgcctttaaatctgtgatgatcctcatatggcccagtgtcaagttgtgcttgtttacagcactactctgtgccagccacacaaacgtttacttatcttatgccacgggaagtttagagagctaagattatctggggaaatcaaaacaaaaacaagcaaacaaaaaaaaaaagcaaaaaca

SEQ ID NO: 11234 - protein, 413 aa, Homo sapiens [sequence omitted]

SEQ ID NO: 11235 - DNA, 1785 bp, Homo sapiens
gctgcgagcagagagggattcctcggaggtcatctgttccatcttcttgcctatgcaaatgcctgcctgaagctgctggaggctggctttgtaccggactttgtacagggaaccagggaaacgaatgcagagtgctcctgacattgcctgtcactttttcccatgatactctggcttcacagtttggagactgccagggaccatgttttgcccattgactattactttccaccccagaagacctgcctgatctgtggagatgaagcttctgggtgtcactatggagctctcacatgtggaagctgcaaggtcttcttcaaaagagccgctgaagggaaacagaagtacctgtgcgccagcagaaatgattgcactattgataaattccgaaggaaaaattgtccatcttgtcgtcttcggaaatgttatgaagcagggatgactctgggagcccggaagctgaagaaacttggtaatctgaaactacaggaggaaggagaggcttccagcaccaccagccccactgaggagacaacccagaagctgacagtgtcacacattgaaggctatgaatgtcagcccatctttctgaatgtcctggaagccattgagccaggtgtagtgtgtgctggacacgacaacaaccagcccgactcctttgcagccttgctctctagcctcaatgaactgggagagagacagcttgtacacgtggtcaagtgggccaaggccttgcctggcttccgcaacttacacgtggacgaccagatggctgtcattcagtactcctggatggggctcatggtgtttgccatgggctggcgatccttcaccaatgtcaactccaggatgctctacttcgcccctgatctggttttcaatgagtaccgcatgcacaagtcccggatgtacagccagtgtgtccgaatgaggcacctctctcaagagtttggatggctccaaatcaccccccaggaattcctgtgcatgaaagcactgctactcttcagcattattccagtggatgggctgaaaaatcaaaaattctttgatgaacttcgaatgaactacatcaaggaactcgatcgtatcattgcatgcaaaagaaaaaatcccacatcctgctcaagacgcttctaccagctcaccaagctcctggactccgtgcagcctattgcgagagagctgcatcagttcacttttgacctgctaatcaagtcacacatggtgagcgtggactttccggaaatgatggcagagatcatctctgtgcaagtgcccaagatcctttctgggaaagtcaagcccatctatttccacacccagtgaagcattggaaaccctatttccccaccccagctcatgccccctttcagatgtcttctgcctgttataactctgcactactcctctgcagtgccttggggaatttcctctattgatgtacagtctgtcatgaacatgttcctgaattctatttgctgggctttttttttctctttctctcctttctttttcttcttccctccctatctaaccctcccatggcaccttcagactttgcttcccattgtggctcctatctgtgttttgaatggtgttgtatgcctttaaatctgtgatgatcctcatatggcccagtgtcaagttgtgcttgtttacagcactactctgtgccagccacacaaacgtttacttatcttatgccacgggaagtttagagagctaagattatctggggaaatcaaaacaaaaacaagcaaacaaaaaaaaaaagcaaaaaca

SEQ ID NO: 11236 - protein, 388 aa, Homo sapiens; identical to SEQ ID NO: 1787

SEQ ID NO: 11237 - DNA, 348 bp, Homo sapiens
tattcttttgtctttcctactggttttatttttttttcatcttcccaggtgtttgatgatcactaagagcttcaacattgctcaccctgaccagcatggataatttagatgtgactctggacagagggatggatcagatgacttcttaagttatcttccagtttaggagttcgtaaactatactttctcctttccagactatcctagtaagaaaattctcttttaagacagagtagaactctggaattcatcagttttgatgtttcttaaagtgtaatctaagatagtgctcctgtattaagttctgatgtctgaccattgttcaaataaagagtaaaatgcaaatga

SEQ ID NO: 11238 - DNA, 368 bp, Homo sapiens
ccccttcccagccctgcaccaaagctgcatttcaggagactctctccagacagcccactccaagcgctagtgttctgttctctttttgtaatcttggaatcttttgttgctctaaatacaattaaaaatggcagaaacttgtttgttggactacatgtgtgactttgggtctgtctctgcctctgctttcagaaatgtcatccattgtgtaaaatattggcttactggtctgccagctaaaacttggccacatcccctgttatggctgcaggatcgagttattgttaacaaagagacccaagaaaagctgctaatgtcctcttatcattgttgttaatttgttaaaacataaagaaatctaaaatttc

SEQ ID NO: 11239 - protein, 69 aa, Homo sapiens [sequence omitted]

SEQ ID NO: 11240 - DNA, 3782 bp, Homo sapiens
ctcggctgcgggagtaggaagcagctttgcgcgcccgggcggccgatgcgggcactttgaagaatcacgtgtgttgaggccctcttaaagagataggcacctacttttccctccaccctaaacaccgccctgagggcggcggcgaccgtggtaattgcaactgctcaggggcagggcttgccccagcgccgagtagtggcaacggcgtggttgcgtcgggggtgcctgggagcctggagtcccgggggcctgaaatcggcagcttcccgggcagacactctctccctcaggaagaggtgccgccgagtcagcgcggggcagtgtgagcgccccgaggtgctttctcagttgaggagaggtggggttacagggcacaggtgacagggccggagaaagatggagcagcccggggcggcggcgtcgggagcgggaggcggcagcgaggaacccggtgggggccggagcaacaagcggagcgcggggaaccgggccgccaatgaagaggaaacgaaaaacaaacccaaattgaacattcaaataaaaactttggcagatgatgtgcgtgaccgaattacaagttttagaaaatctactgtcaaaaaagaaaaacctcttattcaacatcctattgattctcaagtcgcgatgagtgagtttcctgcagctcagccattatatgatgaacgatctttgaatttgtcagaaaaggaagtattggatctctttgaaaaaatgatggaggacatgaaccttaacgaagagaaaaaagctcctttacgaaacaaagactttaccaccaaacgtgagatggttgtccagtatatttctgccactgccaaatctggtgggctgaaaaacagcaaacatgaatgcaccctgtcttcacaagaatatgttcatgaattacgatcgggtatatcagatgagaaacttcttaattgcctagaatccctcagggtttctttaaccagcaatccggtcagctgggttaacaactttggccatgaaggtcttggactcttattggatgagctggaaaagcttctggacaaaaaacagcaagaaaatattgacaagaagaatcagtataaacttattcaatgcctcaaagcatttatgaataataagtttggattacaaaggattctaggagatgaaagaagtcttttactattggcaagagcaattgaccccaaacaacccaacatgatgactgaaatagtaaaaatactttctgctatttgcattgttggagaagagaacattctagataaacttttaggggctataacaacagcagcagaaagaaataacagggaacgattttcaccaattgtggaaggtttagaaaatcaggaagccttgcaattacaggtggcctgcatgcagtttataaatgcccttgtcacttctccttatgagcttgattttcgaatacatttaaggaatgaattcctccgttcaggactaaaaacaatgttaccagatctaaaagaaaaagagaatgatgagcttgatattcagttgaaagtatttgatgaaaacaaagaagatgacctaactgaattatcacaccgtctcaatgacattcgagcagaaatggatgatatgaatgaagtctaccatcttctatataatatgctgaaggacactgctgctgaaaattacttcttatctattctacaacattttttgcttatcagaaatgattattatatcaggccacaatattataaaataattgaggaatgtgtttcacagatagtgctacactgcagtggtatggatccagacttcaaatacaggcaaagattagacatcgatttaactcatctgatagattcttgtgtgaacaaggcgaaagttgaagaaagtgaacaaaaagctgcagagttttcaaagaagttcgatgaagaattcacagctcgacaggaagctcaagcagagcttcaaaaaagagatgagaaaatcaaagaacttgaagcagaaatccagcaacttcgaacccaggcacaagtactctcaagttcatcaggaattccaggtcctcctgcagcacctccattgccaggtgtagggccgcctccaccaccacccgcgccacctctacccggaggagctcctcttcctcctccaccacctcctttacctggaatgatggggataccaccaccacccccaccaccacttttatttgggggacctcctccaccaccaccccttggaggagttcctcctcccccaggaatatcacttaatctaccttatggaatgaagcagaaaaaaatgtataaacctgaagtgtccatgaagagaatcaattggtcaaagattgaacccacagaattatctgagaactgtttctggttaagagtcaaagaagacaagtttgagaatccagatctctttgccaaattggcattgaattttgctactcagataaaagttcaaaagaacgcagaagcattagaagaaaagaagactgggcctacaaagaagaaagtgaaagaactgagaattttggatcccaaaacagctcagaatctgtccatctttctgggatcatatcgcatgccatatgaagacataagaaacgttattctggaggttaatgaagacatgctgagtgaggctttaattcagaaccttgtgaaacatcttcctgagcagaagatactcaacgaattagcagagcttaagaatgaatatgatgacctctgtgagcctgaacaatttggagttgtgatgagctctgtgaaaatgttacagcctcgtctcagtagtatcctgttcaagctcacatttgaagaacacataaacaacatcaaaccaagcatcatagcagtaactcttgcctgtgaagaactgaagaaaagtgaaagctttaacagacttttagagttagttcttcttgttggaaactacatgaactcaggctcaagaaatgcccagtctttgggatttaagatcaacttcctttgtaagatcagagatactaaatcagcggatcaaaaaacaacccttttgcattttattgccgacatttgtgaggaaaaatatcgagatatcctaaaatttcctgaagaactggaacacgtagaaagtgcaagcaaagtttcagctcaaattctcaagagcaaccttgcatcaatggaacaacaaattgttcatctggaacgtgacatcaagaaattcccccaagcagaaaatcaacacgataagtttgtggaaaagatgaccatctttacaaagactgcccgagaacagtatgaaaaactctccaccatgcacaacaacatgatgaagctctatgagaatcttggagaatacttcatttttgactcaaagacagtgagcatagaagagttctttggtgatctcaacaacttccgaactttgtttttggaagcagtgagagaaaacaataagagaagagaaatggaagagaagaccaggagggcaaaacttgcaaaagagaaagctgaacaagaaaagttagaacgccagaagaaaaagaaacaactcattgatataaacaaagagggtgatgagactggtgtgatggataatcttctagaagccctacaatcaggtgcagcattcagagaccgtcgaaagcggattccaaggaatccagtggtaaatcatccctgtgcaacaagggctaatccaagatcagctacataaacggcctgagtgctgttttaaacaggattgggtgatggtacaacatgactttttaagataatcaagtagtaaaagtttctagtggaaacatgata

SEQ ID NO: 11241 - protein, 1096 aa, Homo sapiens [sequence omitted]

SEQ ID NO: 11242 - DNA, 6711 bp, Homo sapiens
ctcggctgcgggagtaggaagcagctttgcgcgcccgggcggccgatgcgggcactttgaagaatcacgtgtgttgaggccctcttaaagagataggcacctacttttccctccaccctaaacaccgccctgagggcggcggcgaccgtggtaattgcaactgctcaggggcagggcttgccccagcgccgagtagtggcaacggcgtggttgcgtcgggggtgcctgggagcctggagtcccgggggcctgaaatcggcagcttcccgggcagacactctctccctcaggaagaggtgccgccgagtcagcgcggggcagtgtgagcgccccgaggtgctttctcagttgaggagaggtggggttacagggcacaggtgacagggccggagaaagatggagcagcccggggcggcggcgtcgggagcgggaggcggcagcgaggaacccggtgggggccggagcaacaagcggagcgcggggaaccgggccgccaatgaagaggaaacgaaaaacaaacccaaattgaacattcaaataaaaactttggcagatgatgtgcgtgaccgaattacaagttttagaaaatctactgtcaaaaaagaaaaacctcttattcaacatcctattgattctcaagtcgcgatgagtgagtttcctgcagctcagccattatatgatgaacgatctttgaatttgtcagaaaaggaagtattggatctctttgaaaaaatgatggaggacatgaaccttaacgaagagaaaaaagctcctttacgaaacaaagactttaccaccaaacgtgagatggttgtccagtatatttctgccactgccaaatctggtgggctgaaaaacagcaaacatgaatgcaccctgtcttcacaagaatatgttcatgaattacgatcgggtatatcagatgagaaacttcttaattgcctagaatccctcagggtttctttaaccagcaatccggtcagctgggttaacaactttggccatgaaggtcttggactcttattggatgagctggaaaagcttctggacaaaaaacagcaagaaaatattgacaagaagaatcagtataaacttattcaatgcctcaaagcatttatgaataataagtttggattacaaaggattctaggagatgaaagaagtcttttactattggcaagagcaattgaccccaaacaacccaacatgatgactgaaatagtaaaaatactttctgctatttgcattgttggagaagagaacattctagataaacttttaggggctataacaacagcagcagaaagaaataacagggaacgattttcaccaattgtggaaggtttagaaaatcaggaagccttgcaattacaggtggcctgcatgcagtttataaatgcccttgtcacttctccttatgagcttgattttcgaatacatttaaggaatgaattcctccgttcaggactaaaaacaatgttaccagatctaaaagaaaaagagaatgatgagcttgatattcagttgaaagtatttgatgaaaacaaagaagatgacctaactgaattatcacaccgtctcaatgacattcgagcagaaatggatgatatgaatgaagtctaccatcttctatataatatgctgaaggacactgctgctgaaaattacttcttatctattctacaacattttttgcttatcagaaatgattattatatcaggccacaatattataaaataattgaggaatgtgtttcacagatagtgctacactgcagtggtatggatccagacttcaaatacaggcaaagattagacatcgatttaactcatctgatagattcttgtgtgaacaaggcgaaagttgaagaaagtgaacaaaaagctgcagagttttcaaagaagttcgatgaagaattcacagctcgacaggaagctcaagcagagcttcaaaaaagagatgagaaaatcaaagaacttgaagcagaaatccagcaacttcgaacccaggcacaagtactctcaagttcatcaggaattccaggtcctcctgcagcacctccattgccaggtgtagggccgcctccaccaccacccgcgccacctctacccggaggagctcctcttcctcctccaccacctcctttacctggaatgatggggataccaccaccacccccaccaccacttttatttgggggacctcctccaccaccaccccttggaggagttcctcctcccccaggaatatcacttaatctaccttatggaatgaagcagaaaaaaatgtataaacctgaagtgtccatgaagagaatcaattggtcaaagattgaacccacagaattatctgagaactgtttctggttaagagtcaaagaagacaagtttgagaatccagatctctttgccaaattggcattgaattttgctactcagataaaagttcaaaagaacgcagaagcattagaagaaaagaagactgggcctacaaagaagaaagtgaaagaactgagaattttggatcccaaaacagctcagaatctgtccatctttctgggatcatatcgcatgccatatgaagacataagaaacgttattctggaggttaatgaagacatgctgagtgaggctttaattcagaaccttgtgaaacatcttcctgagcagaagatactcaacgaattagcagagcttaagaatgaatatgatgacctctgtgagcctgaacaatttggagttgtgatgagctctgtgaaaatgttacagcctcgtctcagtagtatcctgttcaagctcacatttgaagaacacataaacaacatcaaaccaagcatcatagcagtaactcttgcctgtgaagaactgaagaaaagtgaaagctttaacagacttttagagttagttcttcttgttggaaactacatgaactcaggctcaagaaatgcccagtctttgggatttaagatcaacttcctttgtaagatcagagatactaaatcagcggatcaaaaaacaacccttttgcattttattgccgacatttgtgaggaaaaatatcgagatatcctaaaatttcctgaagaactggaacacgtagaaagtgcaagcaaagtttcagctcaaattctcaagagcaaccttgcatcaatggaacaacaaattgttcatctggaacgtgacatcaagaaattcccccaagcagaaaatcaacacgataagtttgtggaaaagatgaccatctttacaaagactgcccgagaacagtatgaaaaactctccaccatgcacaacaacatgatgaagctctatgagaatcttggagaatacttcatttttgactcaaagacagtgagcatagaagagttctttggtgatctcaacaacttccgaactttgtttttggaagcagtgagagaaaacaataagagaagagaaatggaagagaagaccaggagggcaaaacttgcaaaagagaaagctgaacaagaaaagttagaacgccagaagaaaaagaaacaactcattgatataaacaaagagggtgatgagactggtgtgatggataatcttctagaagccctacaatcaggtgcagcattcagagaccgtcgaaagcggattccaaggaatccagataacagacgagtacctttggaaaggtcacgctctcgccacaatggagctatctcatctaagtgattcctgatgccaaagaatatgaaaatatttaagtaaaaacaaaatgatgcattttgagaagaacaaagtgtgcactcagcggctggaaaggaaataagtgcatttctgcaaagatcaagataagctggatgaagtagtgtgcatttgtaatactattgcaagactcctcccacaattattctaatctgaacacagttatcaggattacaaaatgtgttccattttagtgtaaagatgtgtatcatttgtaattgtgtgtgacctgactgtgatgatggaagtgtaagaaattgaagagttctaaggctttcaaaaacactcagtcaaaaatttaaaatcttaaatgtgtaagtcacccccaccaaaaacaaaagagaagaaaaagaatagaaagaattatccagtgtcagcttccaatccctagtacatatataatagaaaagggccaagaaaaatatgcatcttgatttggagagaggctaatattatgcacactgtaagagaagccattttggaaattcacgaaagtactgctccaccccagttgagttatttagaattttatctcaagtgaaagctgatggattcatctgctttggctgaaattaaacttatcattagtctagctagcatttcagcatgatattgcaagcacttctcattgctaaaaataaataaaccaaagtttaaccgaatcagttagggaaagtgatttaaactttatttaaagaggtattttctaattatgcacagatatctactttatacaaatactttatatggctatttttgagaaaaccctcacattttaatgtttatgctagggatgaacctgaaaattctattacgtttatttagatttcaaaggcaaatattgattcctatgctctgtggtttatttcttttttctattgcttctttctcccttgagtcccttgaaggcagggaatagacttctagaaaacctgagaggaaaaagaattctttttacaggaggcagcagaaaactgtctgaaaggtcaattgttttatctccctttccactctctttccaatttcactttggtggtctgaagaagaaaaagaaattttatgtatgtatgtgtaaatatgtgtatatatttctatctcttgctacaataattccaactaagtgaacttctcaattatcatcatacttacttaccttatattaacaaattaagatgatgctgccaaaacaagtctagcagggaaaacaggttctacatttttcttaaataaattagggagtaaaagttatacttaacttgtctgtctattattttaaaatatgcattgaaataatgtggtataacttctctggagtgcaattttaagtctaattcatgcagatgattgattgtgattattgtaagaaatttcttacatgtatatttcttatgtagaaaatactgtttctactcattcaaagcacattgtagatattcagagagaagaacaaatggctggcttggcaaatccccatctgagataaagtaaacaagtgaccagcagcccacagatgattcctttatatagatgtataatgattcaaactgctgcctttgcctccagtgcatccttacttaggtattatacttctttaaaaagctctgaagctgctacaatagaaaaatcaaaaagggtaacagtatctgaaatttcacagtcctatccgatctgaaaacacacatacacaaatgcacacacatgcacacacacatttaagggacatagcagtaacactgttttttaacaacaacaaaagtttaggttctaatttatgtaaatacctagtatgtgtatttttgactttacaaagtctttcttttctgaaatcttcgtggtatggcttttttaattcttttgacagcttatcagtctgtaggagaatgatcttgaaatgttaaccctgactaaaatttgggagcatatgccttgctatattatcaagctggtcaaggtagaaatactgatatgtatcatcaccttttccagatacaaacttgccttattttctagtttgtgaacaagaacgaatgaagtactattattgataacttatatatttttatttagagcaatcccacatgcttttcacaaacattaaaaaaaaaaacctttcagggtctttcatgaagttccaatagttgagtgagttaaaaggtttgtttcccagatttgtaatggtcctgctctagccatttgcagttttgttttagatgattggaaagtatatcaccaaaaaaagtatatagtgacatttttagtatgaaaccaaattacactaaggtcttttgttggccatattactgccacacatgagaagcaccatttatgcagattttcttcagaatatttttaaaaggtacagaatccttaaaatattaacaactaattgcatccatcatctcctttctattcattgcacacaaatgaatttttcactttttaagatgcattcttggtgctcaaaccagatcgaagtttgtctctaaaagctattgtctgcacaggctgctgcatgctctgttgttaaatggatggacaggctattctaaattttggttgatacttttgctactatgggcaattaacttgaaaaaaataatcgatcccaactctgtgctctgatgtacctcttctgccccttttatgacacctttgaccaaatgccttctatggttcacagtgcaggcacaaaactacctctgatacagaagggttctttacaagcttattttacataccgtgaatccctcacctaaagggagaggtgaaagcaaagactgctttgaatgggtattgagggagattgtgtccataccaagccaccctgaagaagtatttcacttgcagtagaactgtggatttgtgctgtcatttcaccttggaataaacacctatctctaagcaggaccaagaatgacttgcaatctatatgtaatggctacttacttattcaataaagttaagatatacgttaaa

SEQ ID NO: 11243 - protein, 1101 aa, Homo sapiens [sequence omitted]

SEQ ID NO: 11244 - DNA, 786 bp, Homo sapiens
agggcttgccccagcgccgagtagtggcaacggcgtggttgcgtcgggggtgcctgggagcctggagtcccgggggcctgaaatcggcagcttcccgggcagacactctctccctcaggaagaggtgccgccgagtcagcgcggggcagtgtgagcgccccgaggtgctttctcagttgaggagaggtggggttacagggcacaggtgacagggccggagaaagatggagcagcccggggcggcggcgtcgggagcgggaggcggcagcgaggaacccggtgggggccggagcaacaagcggagcgcggggaaccgggccgccaatgaagaggaaacgaaaaacaaacccaaattgcgtgaccgaattacaagttttagaaaatctactgtcaaaaaagaaaaacctcttattcaacatcctattgattctcaagtcgcgatgagtgagtttcctgcagctcagccattatatgatgaacgatctttgaatttgtcagaaaaggaagtattggatctctttgaaaaaatgatggaggacatgaaccttaacgaagagaaaaaagctcctttacgaaacaaagactttaccaccaaacgtgagatggttgtccagtatatttctgccactgccaaatctatagttggaagtaaagttacgggtgggctgaaaaacagcaaacatgaatgcaccctgtcttcacaagaatatgttcatgaattacgatcgggtatatcagatgagaaacttcttaattgcctagaatccctcagggtttctttaacca

SEQ ID NO: 11245 - protein, 186 aa, Homo sapiens
MEQPGAAASGAGGGSEEPGGGRSNKRSAGNRAANEEETKNKPKLRDRITSFRKSTVKKEKPLIQHPIDSQVAMSEFPAAQPLYDERSLNLSEKEVLDLFEKMMEDMNLNEEKKAPLRNKDFTTKREMVVQYISATAKSIVGSKVTGGLKNSKHECTLSSQEYVHELRSGISDEKLLNCLESLRVSL

SEQ ID NO: 11246 - DNA, 339 bp, Homo sapiens
atgcagccagattgctcctttaagtgggtccctgatctcattcctcctgaactgggaccagtcattccagatagtggttattcatcatcccacgcagaggccacctatgaagaaggcttggaagtatttgacccctattatttcatcaaacatgtcccaccactgacagaagaacaactaaataggaaatctgttcttccgttgaaaacaagaagcacaccgaaattctccctagatttacacttggatgaaacagtagtgcactgtagtctaaatgaggtagaagaggcagcacttacttttccagtccttttccaagatgtcatttatcaggtttag

SEQ ID NO: 11247 - protein, 112 aa, Homo sapiens
MQPDCSFKWVPDLIPPELGPVIPDSGYSSSHAEATYEEGLEVFDPYYFIKHVPPLTEEQLNRKSVLPLKTRSTPKFSLDLHLDETVVHCSLNEVEEAALTFPVLFQDVIYQV

SEQ ID NO: 11248 - DNA, 2899 bp, Homo sapiens
gaacttcgaaagactggaacacttccgcctgtcaggccagaagagatttcctgacaccacagctggaaacccatgtgcatttcagttcaggaaagaatgcgccgttttccctatatccggaattcgtccctgcgcattccaatacctgaagcggccacagggtacaggacagggagccctccgacagaaaagagtcgcggcgctaaacaaagcctgatatcactccgcttccataagccggatccccataaactacgctctagctcctcccactgccgttgtgggtaacgcggacgtggaagaacctcgtctgcggaggaaaaggtgccgagtcaatccccatacacagccgccgccattgcctcgagtccttgtgtctgactgtctgttcctgctgctgtatgacacagcacctcgaggcaaggaaataagaaaactgcctctgatccaagcagagaaggtagatctgtccccaggtctgtggaactgtcagttgtgaagttttgtaaaatggtcacccaacttaaaactaggaaattacgaagaagagaaaattgccctgtatctgttaaggtctgcctgtagatctgctgtagggcttgtcaccattggaagcaaggtcctacttcagtggcagatctggtggccttggagtggctgaagaccaccaccctccacagggctgggcccatgcacagccatccttccctaccttgagtgagcttcctctgcatgttttctatatcactggcagagcctgtagttggaaaggggacagagtgactactggactttgtgtgaaaacaccaaccgggacaaaacttcagtcaaggctgagacgggtgggggtatataacttgtccttacgttaaacttggaacatggttgactctgggacagaagcaagggctagaggaaaggctgaggctggcctgcaagatggaatcagtggtcctgccactgctagagtgaatggtaaaacccaggccgaggcagtggctgaggcagaactgaaaacagaatcagtgacccaggccaaagctggtgatggagcaatgaccaggacacatacagtgacctacagggaggctatggctgtgacaagggaagtgatcaaggtggaagatacaactaagactagagtcatggttgagactaagacaaaacccctggcagaacgcagtatagtgccacaaaccaagtcaaaggccatgcctatgtctagggtcagtactgtaaccaagtctgaagtcaaggttgttgctgtcattgaggcaaatattaggtcctatgccaagtcacatgataaggccaatactgggtccagacctgacagaagggaagagaccagcattgggatgaaatccagtgatgaggatgaagaaaatatatgctcctggttctggactggagaagagcctagtgtagggtcctggttctggcctgaagaagagacctctcttcaagtttataagcccctacctaagatccaggaaaagcccaagcccacacacaaacccacacttactataaaacaaaaggtaatagcatggtcaagggccaggtatattgtcctagttccagttgaaggaggggagcaatccttgcctccagaaggaaactggaccctggttgagaccttgattgaaactcctctggggattcgacctttgaccaagatcccaccttatcatgggccttattaccagaccttagctgagatcaaaaaacagattaggcaaagggaaaagtatgggcctaatccgaaggcctgccactgcaaatcacgtggctttagtttagagcctaaagagtttgataaacttgttgccctccttaagttaactaaggatcctttcattcatgaaatagctacaatgataatgggcatcagtcctgcttatccatttactcaagatataattcatgatgtaggtattactgttatgattgaaaacttggtcaataatcccaatgttaaagaacaccctggagctttaagtatggtggatgacagctctgagtcttccgaagaaccaaaatcaggggagtcatatatacatcaagtttgtaaaggcataatctcttgccccttgaactcccctgtgcagctggctggactgaaattactagggcacttgagtataaaatttgaagatcactatgtgattaccagttatattccagatttcctcaccttgttaaacaagggaagtgtcaaaaccaagttttatgttttaaaagtgttttcgtgtttgtctaaaaatcacgccaatacaagagaattgatcagtgccaaagtactgtcatcattggttgcaccctttaacaagaatgagtcaaaggccaatattcttaatattattgaaatatttgagaatataaattttcagttcaaaacaaaggcaaagctatttaccaaggaaaagttcactaaatctgagcttatttcaatattccaggaagcaaaacagtttggtcagaaactccaagacttagcagagcacagtgatcccgaagtgagagataaagtcatacgattaatactaaaactctgaatacccctctgttctcataaagcctcaaacagttttttggagttgcaatatgaaaccaatgcatattgtaattataaattcaatacttatgttttccatgttgattgagggaggcaattttatggataccaattaatcttgagatcctgaacatgtgctgatttttattgtgctatatagtatataaattgagatatttttggtatttctgcaacgtgacctgataatgaatctattcatcctgagtaagctatacttctgtgctttatattgatatgtgtattcttttgagattttatttacatgttgttaataaagttgcatgctaaaactggtgaaaa

SEQ ID NO: 11249 - protein, 71 aa, Homo sapiens
MCISVQERMRRFPYIRNSSLRIPIPEAATGYRTGSPPTEKSRGAKQSLISLRFHKPDPHKLRSSSSHCRCG

SEQ ID NO: 11250 - DNA, 3058 bp, Homo sapiens
gctggaaacccatgtgcatttcagttcaggaaagaatggtaggcttggtggggggagctcccgcaaaaggggaactaatacagaaacactctggtatttgtctgcctctcttgttccagcgccgttttccctatatccggaattcgtccctgcgcattccaatacctgaagcggccacagggtacaggacagggagccctccgacagaaaagagtcgcggcgctaaacaaagcctgatatcactccgcttccataagccggatccccataaactacgctctagctcctcccactgccgttgtgggtaacgcggacgtggaagaacctcgtctgcggaggaaaaggtagatgttaaatggtaactacgcgcgaggttctgaggagccctgggaacaggaaggagaaaagaataccaaaagtgacaacagtttgccaatcgcagtctttaatctgataaagcggttatctcgtcttgagtcccaggtgccgagtcaatccccatacacagccgccgccattgcctcgagtccttgtgtctgactgtctgttcctgctgctgtatgacacagcacctcgaggcaaggaaataagaaaactgcctctgatccaagcagagaaggtagatctgtccccaggtctgtggaactgtcagttgtgaagttttgtaaaatggtcacccaacttaaaactaggaaattacgaagaagagaaaattgccctgtatctgttaaggtctgcctgtagatctgctgtagggcttgtcaccattggaagcaaggtcctacttcagtggcagatctggtggccttggagtggctgaagaccaccaccctccacagggctgggcccatgcacagccatccttccctaccttgagtgagcttcctctgcatgttttctatatcactggcagagcctgtagttggaaaggggacagagtgactactggactttgtgtgaaaacaccaaccgggacaaaacttcagtcaaggctgagacgggtgggggtatataacttgtccttacgttaaacttggaacatggttgactctgggacagaagcaagggctagaggaaaggctgaggctggcctgcaagatggaatcagtggtcctgccactgctagagtgaatggtaaaacccaggccgaggcagtggctgaggcagaactgaaaacagaatcagtgacccaggccaaagctggtgatggagcaatgaccaggacacatacagtgacctacagggaggctatggctgtgacaagggaagtgatcaaggtggaagatacaactaagactagagtcatggttgagactaagacaaaacccctggcagaacgcagtatagtgccacaaaccaagtcaaaggccatgcctatgtctagggtcagtactgtaaccaagtctgaagtcaaggttgttgctgtcattgaggcaaatattaggtcctatgccaagtcacatgataaggccaatactgggtccagacctgacagaagggaagagaccagcattgggatgaaatccagtgatgaggatgaagaaaatatatgctcctggttctggactggagaagagcctagtgtagggtcctggttctggcctgaagaagagacctctcttcaagtttataagcccctacctaagatccaggaaaagcccaagcccacacacaaacccacacttactataaaacaaaaggtaatagcatggtcaagggccaggtatattgtcctagttccagttgaaggaggggagcaatccttgcctccagaaggaaactggaccctggttgagaccttgattgaaactcctctggggattcgacctttgaccaagatcccaccttatcatgggccttattaccagaccttagctgagatcaaaaaacagattaggcaaagggaaaagtatgggcctaatccgaaggcctgccactgcaaatcacgtggctttagtttagagcctaaagagtttgataaacttgttgccctccttaagttaactaaggatcctttcattcatgaaatagctacaatgataatgggcatcagtcctgcttatccatttactcaagatataattcatgatgtaggtattactgttatgattgaaaacttggtcaataatcccaatgttaaagaacaccctggagctttaagtatggtggatgacagctctgagtcttccgaagaaccaaaatcaggggagtcatatatacatcaagtttgtaaaggcataatctcttgccccttgaactcccctgtgcagctggctggactgaaattactagggcacttgagtataaaatttgaagatcactatgtgattaccagttatattccagatttcctcaccttgttaaacaagggaagtgtcaaaaccaagttttatgttttaaaagtgttttcgtgtttgtctaaaaatcacgccaatacaagagaattgatcagtgccaaagtactgtcatcattggttgcaccctttaacaagaatgagtcaaaggccaatattcttaatattattgaaatatttgagaatataaattttcagttcaaaacaaaggcaaagctatttaccaaggaaaagttcactaaatctgagcttatttcaatattccaggaagcaaaacagtttggtcagaaactccaagacttagcagagcacagtgatcccgaagtgagagataaagtcatacgattaatactaaaactctgaatacccctctgttctcataaagcctcaaacagttttttggagttgcaatatgaaaccaatgcatattgtaattataaattcaatacttatgttttccatgttgattgagggaggcaattttatggataccaattaatcttgagatcctgaacatgtgctgatttttattgtgctatatagtatataaattgagatatttttggtatttctgcaacgtgacctgataatgaatctattcatcctgagtaagctatacttctgtgctttatattgatatgtgtattcttttgagattttatttacatgttgttaataaagttgcatgctaaaactggtgaaaa

SEQ ID NO: 11251 - protein, 558 aa, Homo sapiens; identical to SEQ ID NO: 1796

SEQ ID NO: 11252 - DNA, 2979 bp, Homo sapiens
gctggaaacccatgtgcatttcagttcaggaaagaatggtaggcttggtggggggagctcccgcaaaaggggaactaatacagaaacactctggtatttgtctgcctctcttgttccagcgccgttttccctatatccggaattcgtccctgcgcattccaatacctgaagcggccacagggtacaggacagggagccctccgacagaaaagagtcgcggcgctaaacaaagcctgatatcactccgcttccataagccggatccccataaactacgctctagctcctcccactgccgttgtgggtaacgcggacgtggaagaacctcgtctgcggaggaaaaggtagatgttaaatggtaactacgcgcgaggttctgaggagccctgggaacaggaaggagaaaagaataccaaaagtgacaacagtttgccaatcgcagtctttaatctgataaagcggttatctcgtcttgagtcccaggtgccgagtcaatccccatacacagccgccgccattgcctcgagtccttgtgtctgactgtctgttcctgctgctgtatgacacagcacctcgaggcaaggaaataagaaaactgcctctgatccaagcagagaaggtctgcctgtagatctgctgtagggcttgtcaccattggaagcaaggtaaggaggagaaagttactccagatcagtgcaggtcctacttcagtggcagatctggtggccttggagtggctgaagaccaccaccctccacagggctgggcccatgcacagccatccttccctaccttgagtgagcttcctctgcatgttttctatatcactggcagagcctgtagttggaaaggggacagagtgactactggactttgtgtgaaaacaccaaccgggacaaaacttcagtcaaggctgagacgggtgggggtatataacttgtccttacgttaaacttggaacatggttgactctgggacagaagcaagggctagaggaaaggctgaggctggcctgcaagatggaatcagtggtcctgccactgctagagtgaatggtaaaacccaggccgaggcagtggctgaggcagaactgaaaacagaatcagtgacccaggccaaagctggtgatggagcaatgaccaggacacatacagtgacctacagggaggctatggctgtgacaagggaagtgatcaaggtggaagatacaactaagactagagtcatggttgagactaagacaaaacccctggcagaacgcagtatagtgccacaaaccaagtcaaaggccatgcctatgtctagggtcagtactgtaaccaagtctgaagtcaaggttgttgctgtcattgaggcaaatattaggtcctatgccaagtcacatgataaggccaatactgggtccagacctgacagaagggaagagaccagcattgggatgaaatccagtgatgaggatgaagaaaatatatgctcctggttctggactggagaagagcctagtgtagggtcctggttctggcctgaagaagagacctctcttcaagtttataagcccctacctaagatccaggaaaagcccaagcccacacacaaacccacacttactataaaacaaaaggtaatagcatggtcaagggccaggtatattgtcctagttccagttgaaggaggggagcaatccttgcctccagaaggaaactggaccctggttgagaccttgattgaaactcctctggggattcgacctttgaccaagatcccaccttatcatgggccttattaccagaccttagctgagatcaaaaaacagattaggcaaagggaaaagtatgggcctaatccgaaggcctgccactgcaaatcacgtggctttagtttagagcctaaagagtttgataaacttgttgccctccttaagttaactaaggatcctttcattcatgaaatagctacaatgataatgggcatcagtcctgcttatccatttactcaagatataattcatgatgtaggtattactgttatgattgaaaacttggtcaataatcccaatgttaaagaacaccctggagctttaagtatggtggatgacagctctgagtcttccgaagaaccaaaatcaggggagtcatatatacatcaagtttgtaaaggcataatctcttgccccttgaactcccctgtgcagctggctggactgaaattactagggcacttgagtataaaatttgaagatcactatgtgattaccagttatattccagatttcctcaccttgttaaacaagggaagtgtcaaaaccaagttttatgttttaaaagtgttttcgtgtttgtctaaaaatcacgccaatacaagagaattgatcagtgccaaagtactgtcatcattggttgcaccctttaacaagaatgagtcaaaggccaatattcttaatattattgaaatatttgagaatataaattttcagttcaaaacaaaggcaaagctatttaccaaggaaaagttcactaaatctgagcttatttcaatattccaggaagcaaaacagtttggtcagaaactccaagacttagcagagcacagtgatcccgaagtgagagataaagtcatacgattaatactaaaactctgaatacccctctgttctcataaagcctcaaacagttttttggagttgcaatatgaaaccaatgcatattgtaattataaattcaatacttatgttttccatgttgattgagggaggcaattttatggataccaattaatcttgagatcctgaacatgtgctgatttttattgtgctatatagtatataaattgagatatttttggtatttctgcaacgtgacctgataatgaatctattcatcctgagtaagctatacttctgtgctttatattgatatgtgtattcttttgagattttatttacatgttgttaataaagttgcatgctaaaactggtgaaaa

SEQ ID NO: 11253 - protein, 558 aa, Homo sapiens; identical to SEQ ID NO: 1796

SEQ ID NO: 11254 - DNA, 2945 bp, Homo sapiens
gctggaaacccatgtgcatttcagttcaggaaagaatggtaggcttggtggggggagctcccgcaaaaggggaactaatacagaaacactctggtatttgtctgcctctcttgttccagcgccgttttccctatatccggaattcgtccctgcgcattccaatacctgaagcggccacagggtacaggacagggagccctccgacagaaaagagtcgcggcgctaaacaaagcctgatatcactccgcttccataagccggatccccataaactacgctctagctcctcccactgccgttgtgggtaacgcggacgtggaagaacctcgtctgcggaggaaaaggtagatgttaaatggtaactacgcgcgaggttctgaggagccctgggaacaggaaggagaaaagaataccaaaagtgacaacagtttgccaatcgcagtctttaatctgataaagcggttatctcgtcttgagtcccaggtgccgagtcaatccccatacacagccgccgccattgcctcgagtccttgtgtctgactgtctgttcctgctgctgtatgacacagcacctcgaggcaaggaaataagaaaactgcctctgatccaagcagagaaggtctgcctgtagatctgctgtagggcttgtcaccattggaagcaaggtcctacttcagtggcagatctggtggccttggagtggctgaagaccaccaccctccacagggctgggcccatgcacagccatccttccctaccttgagtgagcttcctctgcatgttttctatatcactggcagagcctgtagttggaaaggggacagagtgactactggactttgtgtgaaaacaccaaccgggacaaaacttcagtcaaggctgagacgggtgggggtatataacttgtccttacgttaaacttggaacatggttgactctgggacagaagcaagggctagaggaaaggctgaggctggcctgcaagatggaatcagtggtcctgccactgctagagtgaatggtaaaacccaggccgaggcagtggctgaggcagaactgaaaacagaatcagtgacccaggccaaagctggtgatggagcaatgaccaggacacatacagtgacctacagggaggctatggctgtgacaagggaagtgatcaaggtggaagatacaactaagactagagtcatggttgagactaagacaaaacccctggcagaacgcagtatagtgccacaaaccaagtcaaaggccatgcctatgtctagggtcagtactgtaaccaagtctgaagtcaaggttgttgctgtcattgaggcaaatattaggtcctatgccaagtcacatgataaggccaatactgggtccagacctgacagaagggaagagaccagcattgggatgaaatccagtgatgaggatgaagaaaatatatgctcctggttctggactggagaagagcctagtgtagggtcctggttctggcctgaagaagagacctctcttcaagtttataagcccctacctaagatccaggaaaagcccaagcccacacacaaacccacacttactataaaacaaaaggtaatagcatggtcaagggccaggtatattgtcctagttccagttgaaggaggggagcaatccttgcctccagaaggaaactggaccctggttgagaccttgattgaaactcctctggggattcgacctttgaccaagatcccaccttatcatgggccttattaccagaccttagctgagatcaaaaaacagattaggcaaagggaaaagtatgggcctaatccgaaggcctgccactgcaaatcacgtggctttagtttagagcctaaagagtttgataaacttgttgccctccttaagttaactaaggatcctttcattcatgaaatagctacaatgataatgggcatcagtcctgcttatccatttactcaagatataattcatgatgtaggtattactgttatgattgaaaacttggtcaataatcccaatgttaaagaacaccctggagctttaagtatggtggatgacagctctgagtcttccgaagaaccaaaatcaggggagtcatatatacatcaagtttgtaaaggcataatctcttgccccttgaactcccctgtgcagctggctggactgaaattactagggcacttgagtataaaatttgaagatcactatgtgattaccagttatattccagatttcctcaccttgttaaacaagggaagtgtcaaaaccaagttttatgttttaaaagtgttttcgtgtttgtctaaaaatcacgccaatacaagagaattgatcagtgccaaagtactgtcatcattggttgcaccctttaacaagaatgagtcaaaggccaatattcttaatattattgaaatatttgagaatataaattttcagttcaaaacaaaggcaaagctatttaccaaggaaaagttcactaaatctgagcttatttcaatattccaggaagcaaaacagtttggtcagaaactccaagacttagcagagcacagtgatcccgaagtgagagataaagtcatacgattaatactaaaactctgaatacccctctgttctcataaagcctcaaacagttttttggagttgcaatatgaaaccaatgcatattgtaattataaattcaatacttatgttttccatgttgattgagggaggcaattttatggataccaattaatcttgagatcctgaacatgtgctgatttttattgtgctatatagtatataaattgagatatttttggtatttctgcaacgtgacctgataatgaatctattcatcctgagtaagctatacttctgtgctttatattgatatgtgtattcttttgagattttatttacatgttgttaataaagttgcatgctaaaactggtgaaaa

SEQ ID NO: 11255 - protein, 558 aa, Homo sapiens; identical to SEQ ID NO: 1796

SEQ ID NO: 11256 - DNA, 2911 bp, Homo sapiens
gctggaaacccatgtgcatttcagttcaggaaagaatggtaggcttggtggggggagctcccgcaaaaggggaactaatacagaaacactctggtatttgtctgcctctcttgttccagcgccgttttccctatatccggaattcgtccctgcgcattccaatacctgaagcggccacagggtacaggacagggagccctccgacagaaaagagtcgcggcgctaaacaaagcctgatatcactccgcttccataagccggatccccataaactacgctctagctcctcccactgccgttgtgggtaacgcggacgtggaagaacctcgtctgcggaggaaaaggtagatgttaaatggtaactacgcgcgaggttctgaggagccctgggaacaggaaggagaaaagaataccaaaagtgacaacagtttgccaatcgcagtctttaatctgataaagcggttatctcgtcttgagtcccaggtgccgagtcaatccccatacacagccgccgccattgcctcgagtccttgtgtctgactgtctgttcctgctgctgtatgacacagcacctcgaggcaaggaaataagaaaactgcctctgatccaagcagagaaggtcagtgagaaggtcctacttcagtggcagatctggtggccttggagtggctgaagaccaccaccctccacagggctgggcccatgcacagccatccttccctaccttgagtgagcttcctctgcatgttttctatatcactggcagagcctgtagttggaaaggggacagagtgactactggactttgtgtgaaaacaccaaccgggacaaaacttcagtcaaggctgagacgggtgggggtatataacttgtccttacgttaaacttggaacatggttgactctgggacagaagcaagggctagaggaaaggctgaggctggcctgcaagatggaatcagtggtcctgccactgctagagtgaatggtaaaacccaggccgaggcagtggctgaggcagaactgaaaacagaatcagtgacccaggccaaagctggtgatggagcaatgaccaggacacatacagtgacctacagggaggctatggctgtgacaagggaagtgatcaaggtggaagatacaactaagactagagtcatggttgagactaagacaaaacccctggcagaacgcagtatagtgccacaaaccaagtcaaaggccatgcctatgtctagggtcagtactgtaaccaagtctgaagtcaaggttgttgctgtcattgaggcaaatattaggtcctatgccaagtcacatgataaggccaatactgggtccagacctgacagaagggaagagaccagcattgggatgaaatccagtgatgaggatgaagaaaatatatgctcctggttctggactggagaagagcctagtgtagggtcctggttctggcctgaagaagagacctctcttcaagtttataagcccctacctaagatccaggaaaagcccaagcccacacacaaacccacacttactataaaacaaaaggtaatagcatggtcaagggccaggtatattgtcctagttccagttgaaggaggggagcaatccttgcctccagaaggaaactggaccctggttgagaccttgattgaaactcctctggggattcgacctttgaccaagatcccaccttatcatgggccttattaccagaccttagctgagatcaaaaaacagattaggcaaagggaaaagtatgggcctaatccgaaggcctgccactgcaaatcacgtggctttagtttagagcctaaagagtttgataaacttgttgccctccttaagttaactaaggatcctttcattcatgaaatagctacaatgataatgggcatcagtcctgcttatccatttactcaagatataattcatgatgtaggtattactgttatgattgaaaacttggtcaataatcccaatgttaaagaacaccctggagctttaagtatggtggatgacagctctgagtcttccgaagaaccaaaatcaggggagtcatatatacatcaagtttgtaaaggcataatctcttgccccttgaactcccctgtgcagctggctggactgaaattactagggcacttgagtataaaatttgaagatcactatgtgattaccagttatattccagatttcctcaccttgttaaacaagggaagtgtcaaaaccaagttttatgttttaaaagtgttttcgtgtttgtctaaaaatcacgccaatacaagagaattgatcagtgccaaagtactgtcatcattggttgcaccctttaacaagaatgagtcaaaggccaatattcttaatattattgaaatatttgagaatataaattttcagttcaaaacaaaggcaaagctatttaccaaggaaaagttcactaaatctgagcttatttcaatattccaggaagcaaaacagtttggtcagaaactccaagacttagcagagcacagtgatcccgaagtgagagataaagtcatacgattaatactaaaactctgaatacccctctgttctcataaagcctcaaacagttttttggagttgcaatatgaaaccaatgcatattgtaattataaattcaatacttatgttttccatgttgattgagggaggcaattttatggataccaattaatcttgagatcctgaacatgtgctgatttttattgtgctatatagtatataaattgagatatttttggtatttctgcaacgtgacctgataatgaatctattcatcctgagtaagctatacttctgtgctttatattgatatgtgtattcttttgagattttatttacatgttgttaataaagttgcatgctaaaactggtgaaaa

SEQ ID NO: 11257 - protein, 558 aa, Homo sapiens; identical to SEQ ID NO: 1796

SEQ ID NO: 11258 - DNA, 1081 bp, Homo sapiens
gctggaaacccatgtgcatttcagttcaggaaagaatggtaggcttggtggggggagctcccgcaaaaggggaactaatacagaaacactctggtatttgtctgcctctcttgttccagcgccgttttccctatatccggaattcgtccctgcgcattccaatacctgaagcggccacagggtacaggacagggagccctccgacagaaaagagtcgcggcgctaaacaaagcctgatatcactccgcttccataagccggatccccataaactacgctctagctcctcccactgccgttgtgggtaacgcggacgtggaagaacctcgtctgcggaggaaaaggtagatgttaaatggtaactacgcgcgaggttctgaggagccctgggaacaggaaggagaaaagaataccaaaagtgacaacagtttgccaatcgcagtctttaatctgataaagcggttatctcgtcttgagtcccaggtgccgagtcaatccccatacacagccgccgccattgcctcgagtccttgtgtctgactgtctgttcctgctgctgtatgacacagcacctcgaggcaaggaaataagaaaactgcctctgatccaagcagagaagaactcctgtagcctgtaataccagctgtgggtactactctcagtgttggagatcatcaaaatacaattggaccagaccctttggaaataattctgtgtctcaaatgccctgtggagcacacacttaatcagttgatggctatggaattttccaacatcagctaaagagaaggcaatgaatgacacttcctgttgcctcatatcctcaccagtatttggcactgatagagtggtgacttccaagcttcatgcagaaccggacaacagaaattgagagggaaatttctatgacagaagagagaaagaagaaaattgctggaataatgaccttgaatagaggaaatgggatatcatctggtaagcaaatagagaagctggctttagataagagcctggacaattcattcatagaatagcagaaaaggcagaatttatgtccatagatgcaagtggtatagtagat

SEQ ID NO: 11259 - protein, 32 aa, Homo sapiens
MNDTSCCLISSPVFGTDRVVTSKLHAEPDNRN

SEQ ID NO: 11260 - DNA, 1259 bp, Homo sapiens
gctggaaacccatgtgcatttcagttcaggaaagaatggtaggcttggtggggggagctcccgcaaaaggggaactaatacagaaacactctggtatttgtctgcctctcttgttccagcgccgttttccctatatccggaattcgtccctgcgcattccaatacctgaagcggccacagggtacaggacagggagccctccgacagaaaagagtcgcggcgctaaacaaagcctgatatcactccgcttccataagccggatccccataaactacgctctagctcctcccactgccgttgtgggtaacgcggacgtggaagaacctcgtctgcggaggaaaaggtagatgttaaatggtaactacgcgcgaggttctgaggagccctgggaacaggaaggagaaaagaataccaaaagtgacaacagtttgccaatcgcagtctttaatctgataaagcggttatctcgtcttgagtcccaggtgccgagtcaatccccatacacagccgccgccattgcctcgagtccttgtgtctgactgtctgttcctgctgctgtatgacacagcacctcgaggcaaggaaataagaaaactgcctctgatccaagcagagaaggtctgcctgtagatctgctgtagggcttgtcaccattggaagcaagaactcctgtagcctgtaataccagctgtgggtactactctcagtgttggagatcatcaaaatacaattggaccagaccctttggaaataattctgtgtctcaaatgccctgtggagcacacacttaatcagttgatggctatggaattttccaacatcagctaaagagaagggatagagtggtgacttccaagcttcatgcagaaccggacaacagaaattgagagggaaatttctatgacagaagagagaaagaagaaaattgctggaataatgaccttgaatagaggaaatgggatatcatctggtaagcaaatagagaagctggctttagataagagcctggacaattcattcatagaatagcagaaaaggcagaatttatgtccatagatgcaagtggtatagtagatatagtgatgggagtttgtaaaagttaccttctaattgctattttttttaatgaaataagaaacaaagtcatcaactcaaagtgagtaatatgtaggaggtgattattgtttgaggagagaggagaatgtgtgatatcttttgttaattatggtaaaatataacacaaaatttgccattttaa

SEQ ID NO: 11261 - protein, 98 aa, Homo sapiens
MCISVQERMVGLVGGAPAKGELIQKHSGICLPLLFQRRFPYIRNSSLRIPIPEAATGYRTGSPPTEKSRGAKQSLISLRFHKPDPHKLRSSSSHCRCG

SEQ ID NO: 11262 - DNA, 1357 bp, Homo sapiens
gctggaaacccatgtgcatttcagttcaggaaagaatggtaggcttggtggggggagctcccgcaaaaggggaactaatacagaaacactctggtatttgtctgcctctcttgttccagcgccgttttccctatatccggaattcgtccctgcgcattccaatacctgaagcggccacagggtacaggacagggagccctccgacagaaaagagtcgcggcgctaaacaaagcctgatatcactccgcttccataagccggatccccataaactacgctctagctcctcccactgccgttgtgggtaacgcggacgtggaagaacctcgtctgcggaggaaaaggtagatgttaaatggtaactacgcgcgaggttctgaggagccctgggaacaggaaggagaaaagaataccaaaagtgacaacagtttgccaatcgcagtctttaatctgataaagcggttatctcgtcttgagtcccaggtgccgagtcaatccccatacacagccgccgccattgcctcgagtccttgtgtctgactgtctgttcctgctgctgtatgacacagcacctcgaggcaaggaaataagaaaactgcctctgatccaagcagagaaggtctgcctgtagatctgctgtagggcttgtcaccattggaagcaaggtcctacttcagtggcagatctggtggccttggagtggctgaagaccaccaccctccacagggctgggcccatgcacagccatccttccctaccttgaaactcctgtagcctgtaataccagctgtgggtactactctcagtgttggagatcatcaaaatacaattggaccagaccctttggaaataattctgtgtctcaaatgccctgtggagcacacacttaatcagttgatggctatggaattttccaacatcagctaaagagaagggatagagtggtgacttccaagcttcatgcagaaccggacaacagaaattgagagggaaatttctatgacagaagagagaaagaagaaaattgctggaataatgaccttgaatagaggaaatgggatatcatctggtaagcaaatagagaagctggctttagataagagcctggacaattcattcatagaatagcagaaaaggcagaatttatgtccatagatgcaagtggtatagtagatatagtgatgggagtttgtaaaagttaccttctaattgctattttttttaatgaaataagaaacaaagtcatcaactcaaagtgagtaatatgtaggaggtgattattgtttgaggagagaggagaatgtgtgatatcttttgttaattatggtaaaatataacacaaaatttgccattttaa

SEQ ID NO: 11263 - protein, 98 aa, Homo sapiens; identical to SEQ ID NO: 11261

SEQ ID NO: 11264 - DNA, 1213 bp, Homo sapiens
gctggaaacccatgtgcatttcagttcaggaaagaatggtaggcttggtggggggagctcccgcaaaaggggaactaatacagaaacactctggtatttgtctgcctctcttgttccagcgccgttttccctatatccggaattcgtccctgcgcattccaatacctgaagcggccacagggtacaggacagggagccctccgacagaaaagagtcgcggcgctaaacaaagcctgatatcactccgcttccataagccggatccccataaactacgctctagctcctcccactgccgttgtgggtaacgcggacgtggaagaacctcgtctgcggaggaaaaggtagatgttaaatggtaactacgcgcgaggttctgaggagccctgggaacaggaaggagaaaagaataccaaaagtgacaacagtttgccaatcgcagtctttaatctgataaagcggttatctcgtcttgagtcccaggtgccgagtcaatccccatacacagccgccgccattgcctcgagtccttgtgtctgactgtctgttcctgctgctgtatgacacagcacctcgaggcaaggaaataagaaaactgcctctgatccaagcagagaagaactcctgtagcctgtaataccagctgtgggtactactctcagtgttggagatcatcaaaatacaattggaccagaccctttggaaataattctgtgtctcaaatgccctgtggagcacacacttaatcagttgatggctatggaattttccaacatcagctaaagagaagggatagagtggtgacttccaagcttcatgcagaaccggacaacagaaattgagagggaaatttctatgacagaagagagaaagaagaaaattgctggaataatgaccttgaatagaggaaatgggatatcatctggtaagcaaatagagaagctggctttagataagagcctggacaattcattcatagaatagcagaaaaggcagaatttatgtccatagatgcaagtggtatagtagatatagtgatgggagtttgtaaaagttaccttctaattgctattttttttaatgaaataagaaacaaagtcatcaactcaaagtgagtaatatgtaggaggtgattattgtttgaggagagaggagaatgtgtgatatcttttgttaattatggtaaaatataacacaaaatttgccattttaa

SEQ ID NO: 11265 - protein, 98 aa, Homo sapiens; identical to SEQ ID NO: 11261

SEQ ID NO: 11266 - DNA, 2156 bp, Homo sapiens
gctggaaacccatgtgcatttcagttcaggaaagaatggtaggcttggtggggggagctcccgcaaaaggggaactaatacagaaacactctggtatttgtctgcctctcttgttccagcgccgttttccctatatccggaattcgtccctgcgcattccaatacctgaagcggccacagggtacaggacagggagccctccgacagaaaagagtcgcggcgctaaacaaagcctgatatcactccgcttccataagccggatccccataaactacgctctagctcctcccactgccgttgtgggtaacgcggacgtggaagaacctcgtctgcggaggaaaaggtagatgttaaatggtaactacgcgcgaggttctgaggagccctgggaacaggaaggagaaaagaataccaaaagtgacaacagtttgccaatcgcagtctttaatctgataaagcggttatctcgtcttgagtcccaggtgccgagtcaatccccatacacagccgccgccattgcctcgagtccttgtgtctgactgtctgttcctgctgctgtatgacacagcacctcgaggcaaggaaataagaaaactgcctctgatccaagcagagaaggtagatctgtccccaggtctgtggaactgtcagttgtgaagttttgtaaaatggtcacccaacttaaaactaggaaattacgaagaagagaaaattgccctgtatctgttaaggtctgcctgtagatctgctgtagggcttgtcaccattggaagcaaggtcctacttcagtggcagatctggtggccttggagtggctgaagaccaccaccctccacagggctgggcccatgcacagccatccttccctaccttgaaactcctgtagcctgtaataccagctgtgggtactactctcagtgttggagatcatcaaaatacaattggaccagaccctttggaaataattctgtgtctcaaatgccctgtggagcacacacttaatcagttgatggctatggaattttccaacatcagctaaagagaagggatagagtggtgacttccaagcttcatgcagaaccggacaacagaaattgagagggaaatttctatgacagaagagagaaagaagaaaattgctggaataatgaccttgaatagaggaaatgggatatcatctggtaagcaaatagagaagctggctttagataagagcctggacaattcattcatagaatagcagaaaaggcagaatttatgtccatagatgcaagtggtatagtagatatagtgatgggagtttgtaaaagttaccttctaattgctattttttttaatgaaataagaaacaaagtcatcaactcaaagtgagtaatatgtaggaggtgattattgtttgaggagagaggagaatgtgtgatatcttttgttaattatggtaaaatataacacaaaatttgccattttaaccattttaagtggacaattaagtgtcattaattacattcacactgttgtacatctgccaccactatcttcttctaaaactttttatcacctcttatagtttaaattgtgcccccacagaagatatgttggagtcctatcccttaatattaatgtgaccttatttggagataggatctttataaaggtattcaaattaacatgagatcattagggtggaatcctaatccaatatgattagtgtccttataaaaaggggaaatttggacacagaggcaagcacacagggagagtgccaagtgaagatgaagaaaaagatcagagtgatacaaagaagtcaaagaacaccaaagattgccaacaaaccaccagaagctaggagaaaggcctgaaacatatccttcccgcatgccttcagagggagcgtgggcctgcagacactttgatctcagacttctaccctatggaactgtgcaaaaataaatgtctgttgtttaagccattcagtttgtgttacagcacaaatgtattctatttagaatacatcattctaaatagaaattttttaataattaagtattttcctctccttggagcacttggtaacttctaattctactttctatctctattaatttgcctattctagatatatcaaatgagtgaaataatacaatagttgtctttt

SEQ ID NO: 11267 - protein, 98 aa, Homo sapiens; identical to SEQ ID NO: 11261

SEQ ID NO: 11268 - DNA, 1259 bp, Homo sapiens
gctggaaacccatgtgcatttcagttcaggaaagaatggtaggcttggtggggggagctcccgcaaaaggggaactaatacagaaacactctggtatttgtctgcctctcttgttccagcgccgttttccctatatccggaattcgtccctgcgcattccaatacctgaagcggccacagggtacaggacagggagccctccgacagaaaagagtcgcggcgctaaacaaagcctgatatcactccgcttccataagccggatccccataaactacgctctagctcctcccactgccgttgtgggtaacgcggacgtggaagaacctcgtctgcggaggaaaaggtagatgttaaatggtaactacgcgcgaggttctgaggagccctgggaacaggaaggagaaaagaataccaaaagtgacaacagtttgccaatcgcagtctttaatctgataaagcggttatctcgtcttgagtcccaggtgccgagtcaatccccatacacagccgccgccattgcctcgagtccttgtgtctgactgtctgttcctgctgctgtatgacacagcacctcgaggcaaggaaataagaaaactgcctctgatccaagcagagaaggtctgcctgtagatctgctgtagggcttgtcaccattggaagcaaggtcctacttcagtggcagatctggtggccttggagtggctgaagaccaccaccctccacagggctgggcccatgcacagccatccttccctaccttgaaactcctgtagcctgtaataccagctgtgggtactactctcagtgttggagatcatcaaaatacaattggaccagaccctttggaaataattctgtgtctcaaatgccctgtggagcacacacttaatcagttgatggctatggaattttccaacatcagctaaagagaagggatagagtggtgacttccaagcttcatgcagaaccggacaacagaaattgagagggaaatttctatgacagaagagagaaagaagaaaattgctggaataatgaccttgaatagaggaaatgggatatcatctggttctggagacagcctgtatttcttggatcttggcttccttccatcttcaaagccaacgatgaccagtgtagactttctatgctgcttcaatctgacatggagtccctgccttccacatctaaagtacccttgcaattacattggccaagataacccagaataatcttaaattaaactcagctgaatagc

SEQ ID NO: 11269 - protein, 90 aa, Homo sapiens
MQNRTTEIEREISMTEERKKKIAGIMTLNRGNGISSGSGDSLYFLDLGFLPSSKPTMTSVDFLCCFNLTWSPCLPHLKYPCNYIGQDNPE

SEQ ID NO: 11270 - DNA, 864 bp, Homo sapiens
gctggaaacccatgtgcatttcagttcaggaaagaatggtaggcttggtggggggagctcccgcaaaaggggaactaatacagaaacactctggtatttgtctgcctctcttgttccagcgccgttttccctatatccggaattcgtccctgcgcattccaatacctgaagcggccacagggtacaggacagggagccctccgacagaaaagagtcgcggcgctaaacaaagcctgatatcactccgcttccataagccggatccccataaactacgctctagctcctcccactgccgttgtgggtaacgcggacgtggaagaacctcgtctgcggaggaaaaggtagatgttaaatggtaactacgcgcgaggttctgaggagccctgggaacaggaaggagaaaagaataccaaaagtgacaacagtttgccaatcgcagtctttaatctgataaagcggttatctcgtcttgagtcccaggtgccgagtcaatccccatacacagccgccgccattgcctcgagtccttgtgtctgactgtctgttcctgctgctgtatgacacagcacctcgaggcaaggaaataagaaaactgcctctgatccaagcagagaagaactcctgtagcctgtaataccagctgtgggtactactctcagtgttggagatcatcaaaatacaattggaccagaccctttggaaataattctgtgtctcaaatgccctgtggagcacacacttaatcagttgatggctatggaattttccaacatcagctaaagagaaggcccagtggtcctccagagcaaagcccggccttccttccagctgtctgggccaggagcttgagggtcttctagc

SEQ ID NO: 11271 - protein, 98 aa, Homo sapiens; identical to SEQ ID NO: 11261

SEQ ID NO: 11272 - DNA, 2523 bp, Homo sapiens
ctcctcccactgccgttgtgggtaacgcggacgtggaagaacctcgtctgcggaggaaaaggtgccgagtcaatccccatacacagccgccgccattgcctcgagtccttgtgtctgactgtctgttcctgctgctgtatgacacagcacctcgaggcaaggaaataagaaaactgcctctgatccaagcagagaaggtctgcctgtagatctgctgtagggcttgtcaccattggaagcaaggtcctacttcagtggcagatctggtggccttggagtggctgaagaccaccaccctccacagggctgggcccatgcacagccatccttccctaccttgagtgagcttcctctgcatgttttctatatcactggcagagcctgtagttggaaaggggacagagtgactactggactttgtgtgaaaacaccaaccgggacaaaacttcagtcaaggctgagacgggtgggggtatataacttgtccttacgttaaacttggaacatggttgactctgggacagaagcaagggctagaggaaaggctgaggctggcctgcaagatggaatcagtggtcctgccactgctagagtgaatggtaaaacccaggccgaggcagtggctgaggcagaactgaaaacagaatcagtgacccaggccaaagctggtgatggagcaatgaccaggacacatacagtgacctacagggaggctatggctgtgacaagggaagtgatcaaggtggaagatacaactaagactagagtcatggttgagactaagacaaaacccctggcagaacgcagtatagtgccacaaaccaagtcaaaggccatgcctatgtctagggtcagtactgtaaccaagtctgaagtcaaggttgttgctgtcattgaggcaaatattaggtcctatgccaagtcacatgataaggccaatactgggtccagacctgacagaagggaagagaccagcattgggatgaaatccagtgatgaggatgaagaaaatatatgctcctggttctggactggagaagagcctagtgtagggtcctggttctggcctgaagaagagacctctcttcaagtttataagcccctacctaagatccaggaaaagcccaagcccacacacaaacccacacttactataaaacaaaaggtaatagcatggtcaagggccaggtatattgtcctagttccagttgaaggaggggagcaatccttgcctccagaaggaaactggaccctggttgagaccttgattgaaactcctctggggattcgacctttgaccaagatcccaccttatcatgggccttattaccagaccttagctgagatcaaaaaacagattaggcaaagggaaaagtatgggcctaatccgaaggcctgccactgcaaatcacgtggctttagtttagagcctaaagagtttgataaacttgttgccctccttaagttaactaaggatcctttcattcatgaaatagctacaatgataatgggcatcagtcctgcttatccatttactcaagatataattcatgatgtaggtattactgttatgattgaaaacttggtcaataatcccaatgttaaagaacaccctggagctttaagtatggtggatgacagctctgagtcttccgaagaaccaaaatcaggggagtcatatatacatcaagtttgtaaaggcataatctcttgccccttgaactcccctgtgcagctggctggactgaaattactagggcacttgagtataaaatttgaagatcactatgtgattaccagttatattccagatttcctcaccttgttaaacaagggaagtgtcaaaaccaagttttatgttttaaaagtgttttcgtgtttgtctaaaaatcacgccaatacaagagaattgatcagtgccaaagtactgtcatcattggttgcaccctttaacaagaatgagtcaaaggccaatattcttaatattattgaaatatttgagaatataaattttcagttcaaaacaaaggcaaagctatttaccaaggaaaagttcactaaatctgagcttatttcaatattccaggaagcaaaacagtttggtcagaaactccaagacttagcagagcacagtgatcccgaagtgagagataaagtcatacgattaatactaaaactctgaatacccctctgttctcataaagcctcaaacagttttttggagttgcaatatgaaaccaatgcatattgtaattataaattcaatacttatgttttccatgttgattgagggaggcaattttatggataccaattaatcttgagatcctgaacatgtgctgatttttattgtgctatatagtatataaattgagatatttttggtatttctgcaacgtgacctgataatgaatctattcatcctgagtaagctatacttctgtgctttatattgatatgtgtattcttttgagattttatttacatgttgttaataaagttgcatgctaaaactggtgaaaa

SEQ ID NO: 11273 - protein, 558 aa, Homo sapiens; identical to SEQ ID NO: 1796

SEQ ID NO: 11274 - DNA, 3711 bp, Homo sapiens
ctcctcccactgccgttgtgggtaacgcggacgtggaagaacctcgtctgcggaggaaaaggtgccgagtcaatccccatacacagccgccgccattgcctcgagtccttgtgtctgactgtctgttcctgctgctgtatgacacagcacctcgaggcaaggaaataagaaaactgcctctgatccaagcagagaagaactcctgtagcctgtaataccagctgtgggtactactctcagtgttggagatcatcaaaatacaattggaccagaccctttggaaataattctgtgtctcaaatgccctgtggagcacacacttaatcagttgatggctatggaattttccaacatcagctaaagagaagggcctactttaaggctggccaattctgcaagaaaggcaaggaggaggagactggctcacagctctggaggacccccttctgtcagctgtggggcttgacaccacttgaacaagaaaaggagggggaaactgcaccacatcagtgaagatccacctccagtggctgctctgctggtggtggagttgctgctgacaaccaccctcaacgggtctgcacccatccaggaaatatctgtcttcctttagcttggttgtacctgttctcactctatctgtattattgaattattgactgagactgtgtttgggaaggaggctgagtgactactggactggatattgactctaactcttattcccaagcttatatccttaatcacctaaagatcagagtgtgaagaaacaaacctgtgacagatctgtggttgaggtttagactacgggaggagtatattacctgactttctttgtaacttgtaccatgactggggcagagattgagcctagtgcccaggccaagcctgaaaagaaggctggggaagaggttatcgctgggcctgagagagagaatgatgtccctctggtggtcagacccaaggttaggacccaggcaactactggggcaaggcccaaaactgagaccaagtctgtgcctgcggcaaggcccaaaactgaggcccaagcaatgtctggggcaaggcccaaaactgaggtccaagtaatgggtggtgcaagacccaaaacggaggctcaaggaatcacaggggccaggcccaaaaccgatgccagggcagtaggtggcgctcgttctaaaactgatgccaaggcaatccctggagcaaggcccaaggatgaggcccaggcatgggcccagagtgaatttgggactgaagcagtgtcacaggcagaaggagtgtcccagactaatgccgttgcttggccactggccactgctgagtctggatcagttactaaatctaagggcctgtctatggatagagaactagtcaatgtggatgctgaaacctttcctggcacccagggtcagaaaggaatccagccctggtttggaccaggggaggagactaatatggggtcttggtgctattccaggcccagggccagagaggaggcctctaatgagtctgggttctggtcagcagatgagacctctacagcgtcttctttctggactggagaagagacaagtgtcagatcatggcccagggaagagtccaataccaggtccaggcacagggctaaacatcagactaatcccaggtccaggcccagatccaagcaagaagcctatgttgattcctggtctggatctgaggatgaggccagcaacccattctccttctgggttggagaaaataccaataacttgttcaggcccagagtcagggaggaggcaaatatcaggtccaagctcaggacaaatagagaagattgttttgaatctgagtctgaagatgagttctataagcagtcctgggttttgcctggagaagaggccaatagtagattcaggcacagagacaaagaagatcctaatactgccttgaaactcagggcccagaaagatgttgacagtgatagggtcaaacaagaacccaggtttgaggaggaagtcattattgggtcctggttctgggcagaaaaagaggccagtttggagggtggagcttcagcaatctgtgaatctgagccaggaactgaggagggggccattggcggatccgcgtactgggctgaggaaaagtccagtttgggggctgtggccagagaagaggccaagccggagtctgaagaagaggccatatttgggtcctggttctgggacagagatgaggcctgctttgacctaaatccctgtcctgtgtacaaggtcagtgataggttcagagatgcagctgaggagcttaatgcatcctccaggccccaaacctgggacgaggtcactgttgaattcaaacctggtctttttcatggggttggcttccgatccacaagcccctttggaattcccgaagaggcttctgaaatgcttgaggcaaagcccaagaacctggaacttagcccagaaggagaagagcaggaatctttgcttcagcctgatcagcctagtcctgagttcacatttcagtatgatccttcctaccggtcagtccgggaaattcgagagcatcttagggccagggagagtgcagagtctgagagttggtcctgcagctgcatacaatgtgagctgaaaattggttctgaagagtttgaagaattccttttattaatggacaaaattcgggatccttttattcatgaaatatctaaaattgcaatgggtatgagaagtgcttctcaatttacccgagatttcattcgagattcaggtgttgtctcacttattgaaaccttgcttaattatccatcctctagagttaggacaagttttttggaaaatatgattcacatggctccaccttatccaaatctaaacatgattgagacattcatatgtcaagtgtgtgaggaaacccttgcacatagtgtggattcccttgagcagctgactggaataaggatgcttagacacctcactatgactattgactatcacacactgattgccaactatatgtccgggtttctctccttattaaccacagccaatgcgagaacgaagtttcacgttctgaaaatgctattgaatttgtctgaaaatcctgctgtggcaaaaaaactattcagtgccaaagctctttcaatatttgtgggtctctttaacatagaagagacaaatgataatattcaaattgttattaaaatgtttcagaatatcagtaacattataaaaagtggaaagatgtccttaattgatgatgatttcagtcttgagccgcttatttctgcatttcgtgaatttgaggagttagctaagcaactacaagcccaaatagacaaccaaaatgatcctgaggtgggacaacaaagttaatatgattaaccacctgccgctgatcagccttatgttcccaaagagccctgagtagtgctttggtgttcacagtctgtttttttgttgtaacttatattttttaatgctgatgttaactttgtcaaactcttgttttgagctggatcattttgtggatgccaaatgaatatcaaaactgaaaacacatttgttgatatttgtcttgctgtccagattgcggtatttttcagtattaagttttcaatgaactgtgtcacctaagtaagctaccctgctattcgttgtttaaatatatggttctctatttgagtctgtgttttcaataaagttctatgttaaaattggc

SEQ ID NO: 11275 - protein, 838 aa, Homo sapiens; identical to SEQ ID NO: 1800

SEQ ID NO: 11276 - DNA, 468 bp, Homo sapiens
actgccgttgtgggtaacgcggacgtggaagaacctcgtctgcggaggaaaaggtagatgttaaatggtaactacgcgcgaggttctgaggagccctgggaacaggaaggagaaaagaataccaaaatgactactggactttgtgtgaaaacaccaaccgggacaaaacttcagtcaaggctgagacggaactcctgtagcctgtaataccagctgtgggtactactctcagtgttggagatcatcaaaatacaattggaccagaccctttggaaataattctgtgtctcaaatgccctgtggagcacacacttaatcagttgatggctatggaattttccaacatcagctaaagagaagggtgagtgtggggtgtgtacgtatttgtgtcaaagcacaaagttgatggtctctccttggatgggaattgtgggatgcgaagtcatctcctagattgttcatgaggtg

SEQ ID NO: 11277 - protein, 49 aa, Homo sapiens [sequence omitted]

SEQ ID NO: 11278 - DNA, 927 bp, Homo sapiens
actgccgttgtgggtaacgcggacgtggaagaacctcgtctgcggaggaaaaggtgccgagtcaatccccatacacagccgccgccattgcctcgagtccttgtgtctgactgtctgttcctgctgctgtatgacacagcacctcgaggcaaggaaataagaaaactgcctctgatccaagcagagaaggtctgcctgtagatctgctgtagggcttgtcaccattggaagcaaggtcctacttcagtggcagatctggtggccttggagtggctgaagaccaccaccctccacagggctgggcccatgcacagccatccttccctaccttgaaactcctgtagcctgtaataccagctgtgggtactactctcagtgttggagatcatcaaaatacaattggaccagaccctttggaaataattctgtgtctcaaatgccctgtggagcacacacttaatcagttgatggctatggaattttccaacatcagctaaagagaagggatagagtggtgacttccaagcttcatgcagaaccggacaacagaaattgagagggaaatttctatgacagaagagagaaagaagaaaattgctggaataatgaccttgaatagaggaaatgggatatcatctggtaagcaaatagagaagctggctttagataagagcctggacaattcattcatagaatagcagaaaaggcagaatttatgtccatagatgcaagtggtatagtagatatagtgatgggagtttgtaaaagttaccttctaattgctattttttttaatgaaataagaaacaaagtcatcaactcaaagtgagtaatatgtaggaggtgattattgtttgaggagagaggagaatgtgtgatatcttttgttaattatggtaaaatataacacaaaatttgccattttaa

SEQ ID NO: 11279 - protein, 55 aa, Homo sapiens [sequence omitted]

SEQ ID NO: 11280 - DNA, 3743 bp, Homo sapiens
gttgtgggtaacgcggacgtggaagaacctcgtctgcggaggaaaaggtgccgagtcaatccccatacacagccgccgccattgcctcgagtccttgtgtctgactgtctgttcctgctgctgtatgacacagcacctcgaggcaaggaaataagaaaactgcctctgatccaagcagagaaggtctgcctgtagatctgctgtagggcttgtcaccattggaagcaagaactcctgtagcctgtaataccagctgtgggtactactctcagtgttggagatcatcaaaatacaattggaccagaccctttggaaataattctgtgtctcaaatgccctgtggagcacacacttaatcagttgatggctatggaattttccaacatcagctaaagagaagggcctactttaaggctggccaattctgcaagaaaggcaaggaggaggagactggctcacagctctggaggacccccttctgtcagctgtggggcttgacaccacttgaacaagaaaaggagggggaaactgcaccacatcagtgaagatccacctccagtggctgctctgctggtggtggagttgctgctgacaaccaccctcaacgggtctgcacccatccaggaaatatctgtcttcctttagcttggttgtacctgttctcactctatctgtattattgaattattgactgagactgtgtttgggaaggaggctgagtgactactggactggatattgactctaactcttattcccaagcttatatccttaatcacctaaagatcagagtgtgaagaaacaaacctgtgacagatctgtggttgaggtttagactacgggaggagtatattacctgactttctttgtaacttgtaccatgactggggcagagattgagcctagtgcccaggccaagcctgaaaagaaggctggggaagaggttatcgctgggcctgagagagagaatgatgtccctctggtggtcagacccaaggttaggacccaggcaactactggggcaaggcccaaaactgagaccaagtctgtgcctgcggcaaggcccaaaactgaggcccaagcaatgtctggggcaaggcccaaaactgaggtccaagtaatgggtggtgcaagacccaaaacggaggctcaaggaatcacaggggccaggcccaaaaccgatgccagggcagtaggtggcgctcgttctaaaactgatgccaaggcaatccctggagcaaggcccaaggatgaggcccaggcatgggcccagagtgaatttgggactgaagcagtgtcacaggcagaaggagtgtcccagactaatgccgttgcttggccactggccactgctgagtctggatcagttactaaatctaagggcctgtctatggatagagaactagtcaatgtggatgctgaaacctttcctggcacccagggtcagaaaggaatccagccctggtttggaccaggggaggagactaatatggggtcttggtgctattccaggcccagggccagagaggaggcctctaatgagtctgggttctggtcagcagatgagacctctacagcgtcttctttctggactggagaagagacaagtgtcagatcatggcccagggaagagtccaataccaggtccaggcacagggctaaacatcagactaatcccaggtccaggcccagatccaagcaagaagcctatgttgattcctggtctggatctgaggatgaggccagcaacccattctccttctgggttggagaaaataccaataacttgttcaggcccagagtcagggaggaggcaaatatcaggtccaagctcaggacaaatagagaagattgttttgaatctgagtctgaagatgagttctataagcagtcctgggttttgcctggagaagaggccaatagtagattcaggcacagagacaaagaagatcctaatactgccttgaaactcagggcccagaaagatgttgacagtgatagggtcaaacaagaacccaggtttgaggaggaagtcattattgggtcctggttctgggcagaaaaagaggccagtttggagggtggagcttcagcaatctgtgaatctgagccaggaactgaggagggggccattggcggatccgcgtactgggctgaggaaaagtccagtttgggggctgtggccagagaagaggccaagccggagtctgaagaagaggccatatttgggtcctggttctgggacagagatgaggcctgctttgacctaaatccctgtcctgtgtacaaggtcagtgataggttcagagatgcagctgaggagcttaatgcatcctccaggccccaaacctgggacgaggtcactgttgaattcaaacctggtctttttcatggggttggcttccgatccacaagcccctttggaattcccgaagaggcttctgaaatgcttgaggcaaagcccaagaacctggaacttagcccagaaggagaagagcaggaatctttgcttcagcctgatcagcctagtcctgagttcacatttcagtatgatccttcctaccggtcagtccgggaaattcgagagcatcttagggccagggagagtgcagagtctgagagttggtcctgcagctgcatacaatgtgagctgaaaattggttctgaagagtttgaagaattccttttattaatggacaaaattcgggatccttttattcatgaaatatctaaaattgcaatgggtatgagaagtgcttctcaatttacccgagatttcattcgagattcaggtgttgtctcacttattgaaaccttgcttaattatccatcctctagagttaggacaagttttttggaaaatatgattcacatggctccaccttatccaaatctaaacatgattgagacattcatatgtcaagtgtgtgaggaaacccttgcacatagtgtggattcccttgagcagctgactggaataaggatgcttagacacctcactatgactattgactatcacacactgattgccaactatatgtccgggtttctctccttattaaccacagccaatgcgagaacgaagtttcacgttctgaaaatgctattgaatttgtctgaaaatcctgctgtggcaaaaaaactattcagtgccaaagctctttcaatatttgtgggtctctttaacatagaagagacaaatgataatattcaaattgttattaaaatgtttcagaatatcagtaacattataaaaagtggaaagatgtccttaattgatgatgatttcagtcttgagccgcttatttctgcatttcgtgaatttgaggagttagctaagcaactacaagcccaaatagacaaccaaaatgatcctgaggtgggacaacaaagttaatatgattaaccacctgccgctgatcagccttatgttcccaaagagccctgagtagtgctttggtgttcacagtctgtttttttgttgtaacttatattttttaatgctgatgttaactttgtcaaactcttgttttgagctggatcattttgtggatgccaaatgaatatcaaaactgaaaacacatttgttgatatttgtcttgctgtccagattgcggtatttttcagtattaagttttcaatgaactgtgtcacctaagtaagctaccctgctattcgttgtttaaatatatggttctctatttgagtctgtgttttcaataaagttctatgttaaaattggc

SEQ ID NO: 11281 - protein, 838 aa, Homo sapiens; identical to SEQ ID NO: 1800

SEQ ID NO: 11282 - DNA, 384 bp, Homo sapiens
gtatacgactagagcgacatactaaaacacacgcaagatctgtcttgaaaaatgctgttgccggggaccctcagatcatgttacctgagcatcctcagatgaaccaagcatgcaatcagagggagaatgtcgcgtatccagtgttcacctctgatacccacatccacccccaagcgatgcgcaccttctcactgaccttctctgcttggatcagaggcagttttcttatttccttgcctcgaggtgctgtgtcatacagcagcaggaacagacagtcagacacaaggactcgaggcaatggcggcggctgtgtatggggattgactcggcacctgggactcaagacgagataaccgctttatcagattaaagactgcgattggc

SEQ ID NO: 11283 - protein, 91 aa, Homo sapiens
MLPEHPQMNQACNQRENVAYPVFTSDTHIHPQAMRTFSLTFSAWIRGSFLISLPRGAVSYSSRNRQSDTRTRGNGGGCVWGLTRHLGLKTR

SEQ ID NO: 11284 - DNA, 3065 bp, Homo sapiens
gtcagactttgagaatagagcagaggggcttggagatttaggagtgggagaaaaaggggagatagaaaatgtttgccaaacaggtacttatatccagaaagaaactgtgccctaggtgctggtctctaccaaaaacagcctcaactgtctcctgtgtcttcatttattggtctctgtttttgtgaatccctgtaggtagatctgtccccaggtctgtggaactgtcagttgtgaagttttgtaaaatggtcacccaacttaaaactaggaaattacgaagaagagaaaattgccctgtatctgttaaggttggtgtaaaggtacagggacaggggggcaacttcgactagagaattccatctcttctgttttgtcattttaccaattattcccatctgccccaccccctgctgctgctgatttagttgggagtcttggtaagttgtgggggtacagaatgctaagctgcctttcccactctccactgcttgtcctgctctcacgcttgaacctagtctaatctgaacgagggacattctagggcaatcactgaagaggaagatggtgggcaataggaaggaggaggaggagtagccctgaaacaaagcagtgggggagaggggataggaggagggaaacactagacaaaatctggaaaggcaagaataagggcaagggaccaaggtctgtcaccaggagatcagtttccacattctcctgtttgtttatttgtccataggtctgcctgtagatctgctgtagggcttgtcaccattggaagcaaggtcctacttcagtggcagatctggtggccttggagtggctgaagaccaccaccctccacagggctgggcccatgcacagccatccttccctaccttgagtgagcttcctctgcatgttttctatatcactggcagagcctgtagttggaaaggggacagagtgactactggactttgtgtgaaaacaccaaccgggacaaaacttcagtcaaggctgagacgggtgggggtatataacttgtccttacgttaaacttggaacatggttgactctgggacagaagcaagggctagaggaaaggctgaggctggcctgcaagatggaatcagtggtcctgccactgctagagtgaatggtaaaacccaggccgaggcagtggctgaggcagaactgaaaacagaatcagtgacccaggccaaagctggtgatggagcaatgaccaggacacatacagtgacctacagggaggctatggctgtgacaagggaagtgatcaaggtggaagatacaactaagactagagtcatggttgagactaagacaaaacccctggcagaacgcagtatagtgccacaaaccaagtcaaaggccatgcctatgtctagggtcagtactgtaaccaagtctgaagtcaaggttgttgctgtcattgaggcaaatattaggtcctatgccaagtcacatgataaggccaatactgggtccagacctgacagaagggaagagaccagcattgggatgaaatccagtgatgaggatgaagaaaatatatgctcctggttctggactggagaagagcctagtgtagggtcctggttctggcctgaagaagagacctctcttcaagtttataagcccctacctaagatccaggaaaagcccaagcccacacacaaacccacacttactataaaacaaaaggtaatagcatggtcaagggccaggtatattgtcctagttccagttgaaggaggggagcaatccttgcctccagaaggaaactggaccctggttgagaccttgattgaaactcctctggggattcgacctttgaccaagatcccaccttatcatgggccttattaccagaccttagctgagatcaaaaaacagattaggcaaagggaaaagtatgggcctaatccgaaggcctgccactgcaaatcacgtggctttagtttagagcctaaagagtttgataaacttgttgccctccttaagttaactaaggatcctttcattcatgaaatagctacaatgataatgggcatcagtcctgcttatccatttactcaagatataattcatgatgtaggtattactgttatgattgaaaacttggtcaataatcccaatgttaaagaacaccctggagctttaagtatggtggatgacagctctgagtcttccgaagaaccaaaatcaggggagtcatatatacatcaagtttgtaaaggcataatctcttgccccttgaactcccctgtgcagctggctggactgaaattactagggcacttgagtataaaatttgaagatcactatgtgattaccagttatattccagatttcctcaccttgttaaacaagggaagtgtcaaaaccaagttttatgttttaaaagtgttttcgtgtttgtctaaaaatcacgccaatacaagagaattgatcagtgccaaagtactgtcatcattggttgcaccctttaacaagaatgagtcaaaggccaatattcttaatattattgaaatatttgagaatataaattttcagttcaaaacaaaggcaaagctatttaccaaggaaaagttcactaaatctgagcttatttcaatattccaggaagcaaaacagtttggtcagaaactccaagacttagcagagcacagtgatcccgaagtgagagataaagtcatacgattaatactaaaactctgaatacccctctgttctcataaagcctcaaacagttttttggagttgcaatatgaaaccaatgcatattgtaattataaattcaatacttatgttttccatgttgattgagggaggcaattttatggataccaattaatcttgagatcctgaacatgtgctgatttttattgtgctatatagtatataaattgagatatttttggtatttctgcaacgtgacctgataatgaatctattcatcctgagtaagctatacttctgtgctttatattgatatgtgtattcttttgagattttatttacatgttgttaataaagttgcatgctaaaactggtgaaaa

SEQ ID NO: 11285 - protein, 558 aa, Homo sapiens; identical to SEQ ID NO: 1796

SEQ ID NO: 11286 - DNA, 5487 bp, Homo sapiens
gtcgtcgccacgttagggtccgcggggtcctcctgaggcagcctggtgccaacccgcaggccccggctggggctcgtcctggccccgcccacctctgggtcggaactatggtggttctgtgagggggggcgtcctgcactttcgcgccgtatccctccgccccccttcccgacaccctcgcggagagcggttcttgccgcatcctgcgcagcccctgcccagtttggtgcagaggcgtggggggcgggactcgtctttgccattcggatcgctgggaaagcggtgggaatccaactgaagagcagccagaggagagctgaagagaggagggggaggccgatgacctgggctctgggcctctgaaggcaagtaggggtctggcgtattctgacaggacacagtgagcatctgtagaggagaggcttgaaataaaggaggagcacgaatattccctggatttctggaggcctgctttaaggctggccagttctgcaagaaaggcaaggaggaggagactggctcacacctctggaggacccccttctgtcagctgtggggcttgacactacttgaacaagaaaaggagggggaaactgcaccacataagtgaagatccacctccagtggctgctctgctggtggtggggttgctgctgacaaccaccctcaacgggtctgcacccatccaggaaatctctgtcttcctcaagcttggttgtgcctgttctacactctatctgtattattgaattactgactgagactgtgtttgggaaggaggctgagtgactactggactggatattgactctaactcttgtttccaagcttatatcctcaatcacctaaagatcagagtgtgaagaaacaaacctgtgacagatctgtggttgaggtttagactgggggaggagtatagtactggactttctttgtaacttgtaccatgactggggcagagattgagtctggtgcccaggtcaagcctgaaaagaagcctggggaagaggttgtaggtggggctgagatagagaatgatgtccctctggtggtcagacccaaggttaggacccaggcccagataatgcctggggcaaggcccaagaataagtccaaggttatgcctggagcaagcaccaaagttgagacaagtgcagtgggtggggcacgccctaagagtaaggccaaggcaatacctgtttcacgatttaaggaagaagcccagatgtgggctcagcccaggtttggtgctgaaagattgtctaagacagagagaaactcccagaccaatatcatagcctctccacttgtcagtactgattctgtcttggttgctaaaacaaagtacctgtctgaggatagagaactggttaatacagacactgagagctttcctagaaggaaggcccattaccaagcaggattccagccttcttttaggtcaaaggaggagaccaatatggggtcctggtgctgtcctaggcctacatccaaacaagaagcctctcctaattctgatttcaaatgggtagacaaatctgtgagttccttgttctggagtggagatgaggtcactgcaaaatttcatcctgggaatagggtaaaagacagtaacagatccatgcacatggccaatcaagaggctaataccatgtctaggtcccaaactaaccaggagctctatattgcatctagttctggttctgaggatgagtctgttaagacaccctggttctgggccagagataaaaccaatacctggtctgggcccagggaagatcccaatagcaggtccaggtttaggtctaagaaagaagtctatgttgaatcaagttctggatctgagcatgaagaccatttggagtcctggtttggggctggaaaggaggccaaattcaggtccaaaatgagagctgggaaggaggccaataacagggccaggcacagggccaagcgagaagcttgcattgatttcatgcctgggtctatagatgtaattaaaaaagagtcctgtttctggcctgaagaaaatgctaataccttttcaaggcccatgatcaagaaagaggccagggccagagcaatgacaaaggaagaggccaaaaccaaggcccgagccagggccaagcaagaagccaggtcagaggaggaagccctcattgggacctggttctgggctacagacgagtccagcatggcagatgaagccagcatagagtccagtctacaagtggaggatgagtccataattgggagttggttctggactgaagaagaggccagtatggggactggggctagcagtaaatccagaccaaggactgatggggagcgtattggtgattccttatttggggctagggaaaagaccagtatgaaaactggggctgaggccacctctgaatctatactagcagctgatgatgaacaggtcattattggttcctggttctgggctggtgaagaggtcaaccaagaggctgaggaagagaccatttttgggtcgtggttctgggtcattgatgcggccagtgtggaatctggtgttggggtcagctgtgagtccaggacaaggtctgaggaagaagaggtcattggtccctggttttggtctggagaacaagttgatatagaggctggaatcggagaagaggccaggccaggagctgaagaagagacaatattcgggtcctggttttgggctgaaaaccagacctatatggattgtagggctgaaactagctgtgacaccatgcaaggggctgaggaggaggagcccattattgggtcctggttttggaccagagtagaagcttgtgtggagggtgatgtcaacagcaagtctagcctggaggacaaggaagaggccatgataccatgttttggagccaaagaagaggtcagtatgaagcatgggactggtgtcagatgcagatttatggcaggggctgaggagaccaataataagtcttgcttctgggcagaaaaagaaccctgtatgtatcctgccggtggaggaagttggaagtctaggccagaggaggaagaggacattgtcaattcgtggttctggtccagaaaatacacaaagccagaggccattatagggtcctggttatgggctacagaagagagtaatatagatgggactggagaaaaggccaagttactgactgaagaggagaccataatcaattcctggttctggaaagaagatgaagccatttcagaggctactgacagagaagagtccaggccagaagctgaggagggggacattattggttcttggttctgggctggagaagaggacagactagagccagctgctgagactagagaagaagacaggctagcagctgagaaagaaggtattgttgggtcctggtttggggccagagaagagaccattagaagagaggctgggtcttgcagcaaatccagtcctaaagctgaagaggaagaagtcattattgggtcctggttctgggaagaagaggccagtccggaggcagtggcaggagtcggctttgagtcaaagcctgggactgaggaggaagaaatcactgttgggtcctggttctggcctgaagaagaagccagtatacaggctggatctcaggcagtagaggaaatggagtcagagactgaagaggaaaccatttttgggtcctggttctgggatggaaaagaagtcagtgaagaagcaggaccatgctgtgtatccaagccagaggatgatgaagagatgattgttgagtcctggttctggtctagagacaaagccattaaggaaactggaactgtggccacctgtgagtccaagccagaaaatgaggaaggggccattgttgggtcttggtttgaggctgaagatgaggtagataacaggactgacaatggaagcaactgtgggtccaggacattagctgatgaagatgaggccatagtggggtcctggttctgggcaggagatgaggcccattttgaatcaaatcctagccccgtgttcagggccatttgcaggtccacgtgttcagttgaacaggagcctgatccttcacgcaggcctcagagttgggaggaggtcactgttcagttcaagcctggtccatggggtagggtcggcttcccatctataagcccctttagatttccgaaagaggcagcatctttattctgtgaaatgtttgggggcaaacccaggaacatggtacttagcccagaaggggaagatcaggaatctttgcttcagcctgatcagcctagtcctgagttcccatttcagtatgatccttcctacaggtcagtccaggaaattcgagagcatcttagggccaaggagagtacagagcctgagagttcatcctgtaactgcatacaatgtgagctgaaaattggttctgaagagtttgaagaactccttttattaatggaaaaaattcgggatccttttattcatgaaatatctaaaatcgcaatgggtatgagaagtgcttctcaatttacccgagatttcattcgagattcaggtgttgtctcacttattgaaaccttgcttaattatccgtcctcccgagttagaacaagttttttggaaaatatgattcgcatggccccaccttatccgaatctaaacataattcagacatacatatgtaaagtgtgtgaggaaacccttgcttatagcgtggattccccggaacagctgtctggaataaggatgattagacatctcactactactactgactatcacacactggttgccaattatatgtctgggtttctctccttattagctacaggcaatgccaaaacaaggtttcatgttttgaaaatgctactgaatttgtctgaaaatcttttcatgacaaaagaactactcagtgctgaagcagtgtcagaatttataggcctctttaacagggaagagacaaatgacaatattcaaattgttcttgcaatatttgagaatattggcaacaatatcaaaaaagaaacagtgttctctgatgatgatttcaatattgagccgcttatttctgcattccacaaagttgagaaatttgctaaggaactgcaaggcaaaacagacaatcaaaatgaccctgaaggggaccaagaaaattagtaatggttaattgctggcctcagattgtccttatgttcctgagttatgatccttgagtaatgctttgattttaatagttggttctgtgttgcaacatatatctttagtgctgacactaactttgtccaactctgtctgtaagctggagcatttttctgatgccagctgaatattagagctgaaaacacatttgttgatatttgtcttgtccacattgtgatgttcagtatttgagcttatagtgaactgagcaatcataaataagccacccttctgattgtcgttctactgtatatatatatatatttgagtgttgtttgtgtttcaataaagtcctatgttaaagttggcag

SEQ ID NO: 11287 - protein, 1395 aa, Homo sapiens; identical to SEQ ID NO: 1798

SEQ ID NO: 11288 - DNA, 5249 bp, Homo sapiens
actttcgcgccgtatccctccgccccccttcccgacaccctcgcggagagcggttcttgccgcatcctgcgcagcccctgcccagtttggtgcagaggcgtggggggcgggactcgtctttgccattcggatcgctgggaaagcggtgggaatccaactgaagagcagccagaggagagctgaagagaggagggggaggccgatgacctgggctctgggcctctgaaggcctgctttaaggctggccagttctgcaagaaaggcaaggaggaggagactggctcacacctctggaggacccccttctgtcagctgtggggcttgacactacttgaacaagaaaaggagggggaaactgcaccacataagtgaagatccacctccagtggctgctctgctggtggtggggttgctgctgacaaccaccctcaacgggtctgcacccatccaggaaatctctgtcttcctcaagcttggttgtgcctgttctacactctatctgtattattgaattactgactgagactgtgtttgggaaggaggctgagtgactactggactggatattgactctaactcttgtttccaagcttatatcctcaatcacctaaagatcagagtgtgaagaaacaaacctgtgacagatctgtggttgaggtttagactgggggaggagtatagtactggactttctttgtaacttgtaccatgactggggcagagattgagtctggtgcccaggtcaagcctgaaaagaagcctggggaagaggttgtaggtggggctgagatagagaatgatgtccctctggtggtcagacccaaggttaggacccaggcccagataatgcctggggcaaggcccaagaataagtccaaggttatgcctggagcaagcaccaaagttgagacaagtgcagtgggtggggcacgccctaagagtaaggccaaggcaatacctgtttcacgatttaaggaagaagcccagatgtgggctcagcccaggtttggtgctgaaagattgtctaagacagagagaaactcccagaccaatatcatagcctctccacttgtcagtactgattctgtcttggttgctaaaacaaagtacctgtctgaggatagagaactggttaatacagacactgagagctttcctagaaggaaggcccattaccaagcaggattccagccttcttttaggtcaaaggaggagaccaatatggggtcctggtgctgtcctaggcctacatccaaacaagaagcctctcctaattctgatttcaaatgggtagacaaatctgtgagttccttgttctggagtggagatgaggtcactgcaaaatttcatcctgggaatagggtaaaagacagtaacagatccatgcacatggccaatcaagaggctaataccatgtctaggtcccaaactaaccaggagctctatattgcatctagttctggttctgaggatgagtctgttaagacaccctggttctgggccagagataaaaccaatacctggtctgggcccagggaagatcccaatagcaggtccaggtttaggtctaagaaagaagtctatgttgaatcaagttctggatctgagcatgaagaccatttggagtcctggtttggggctggaaaggaggccaaattcaggtccaaaatgagagctgggaaggaggccaataacagggccaggcacagggccaagcgagaagcttgcattgatttcatgcctgggtctatagatgtaattaaaaaagagtcctgtttctggcctgaagaaaatgctaataccttttcaaggcccatgatcaagaaagaggccagggccagagcaatgacaaaggaagaggccaaaaccaaggcccgagccagggccaagcaagaagccaggtcagaggaggaagccctcattgggacctggttctgggctacagacgagtccagcatggcagatgaagccagcatagagtccagtctacaagtggaggatgagtccataattgggagttggttctggactgaagaagaggccagtatggggactggggctagcagtaaatccagaccaaggactgatggggagcgtattggtgattccttatttggggctagggaaaagaccagtatgaaaactggggctgaggccacctctgaatctatactagcagctgatgatgaacaggtcattattggttcctggttctgggctggtgaagaggtcaaccaagaggctgaggaagagaccatttttgggtcgtggttctgggtcattgatgcggccagtgtggaatctggtgttggggtcagctgtgagtccaggacaaggtctgaggaagaagaggtcattggtccctggttttggtctggagaacaagttgatatagaggctggaatcggagaagaggccaggccaggagctgaagaagagacaatattcgggtcctggttttgggctgaaaaccagacctatatggattgtagggctgaaactagctgtgacaccatgcaaggggctgaggaggaggagcccattattgggtcctggttttggaccagagtagaagcttgtgtggagggtgatgtcaacagcaagtctagcctggaggacaaggaagaggccatgataccatgttttggagccaaagaagaggtcagtatgaagcatgggactggtgtcagatgcagatttatggcaggggctgaggagaccaataataagtcttgcttctgggcagaaaaagaaccctgtatgtatcctgccggtggaggaagttggaagtctaggccagaggaggaagaggacattgtcaattcgtggttctggtccagaaaatacacaaagccagaggccattatagggtcctggttatgggctacagaagagagtaatatagatgggactggagaaaaggccaagttactgactgaagaggagaccataatcaattcctggttctggaaagaagatgaagccatttcagaggctactgacagagaagagtccaggccagaagctgaggagggggacattattggttcttggttctgggctggagaagaggacagactagagccagctgctgagactagagaagaagacaggctagcagctgagaaagaaggtattgttgggtcctggtttggggccagagaagagaccattagaagagaggctgggtcttgcagcaaatccagtcctaaagctgaagaggaagaagtcattattgggtcctggttctgggaagaagaggccagtccggaggcagtggcaggagtcggctttgagtcaaagcctgggactgaggaggaagaaatcactgttgggtcctggttctggcctgaagaagaagccagtatacaggctggatctcaggcagtagaggaaatggagtcagagactgaagaggaaaccatttttgggtcctggttctgggatggaaaagaagtcagtgaagaagcaggaccatgctgtgtatccaagccagaggatgatgaagagatgattgttgagtcctggttctggtctagagacaaagccattaaggaaactggaactgtggccacctgtgagtccaagccagaaaatgaggaaggggccattgttgggtcttggtttgaggctgaagatgaggtagataacaggactgacaatggaagcaactgtgggtccaggacattagctgatgaagatgaggccatagtggggtcctggttctgggcaggagatgaggcccattttgaatcaaatcctagccccgtgttcagggccatttgcaggtccacgtgttcagttgaacaggagcctgatccttcacgcaggcctcagagttgggaggaggtcactgttcagttcaagcctggtccatggggtagggtcggcttcccatctataagcccctttagatttccgaaagaggcagcatctttattctgtgaaatgtttgggggcaaacccaggaacatggtacttagcccagaaggggaagatcaggaatctttgcttcagcctgatcagcctagtcctgagttcccatttcagtatgatccttcctacaggtcagtccaggaaattcgagagcatcttagggccaaggagagtacagagcctgagagttcatcctgtaactgcatacaatgtgagctgaaaattggttctgaagagtttgaagaactccttttattaatggaaaaaattcgggatccttttattcatgaaatatctaaaatcgcaatgggtatgagaagtgcttctcaatttacccgagatttcattcgagattcaggtgttgtctcacttattgaaaccttgcttaattatccgtcctcccgagttagaacaagttttttggaaaatatgattcgcatggccccaccttatccgaatctaaacataattcagacatacatatgtaaagtgtgtgaggaaacccttgcttatagcgtggattccccggaacagctgtctggaataaggatgattagacatctcactactactactgactatcacacactggttgccaattatatgtctgggtttctctccttattagctacaggcaatgccaaaacaaggtttcatgttttgaaaatgctactgaatttgtctgaaaatcttttcatgacaaaagaactactcagtgctgaagcagtgtcagaatttataggcctctttaacagggaagagacaaatgacaatattcaaattgttcttgcaatatttgagaatattggcaacaatatcaaaaaagaaacagtgttctctgatgatgatttcaatattgagccgcttatttctgcattccacaaagttgagaaatttgctaaggaactgcaaggcaaaacagacaatcaaaatgaccctgaaggggaccaagaaaattagtaatggttaattgctggcctcagattgtccttatgttcctgagttatgatccttgagtaatgctttgattttaatagttggttctgtgttgcaacatatatctttagtgctgacactaactttgtccaactctgtctgtaagctggagcatttttctgatgccagctgaatattagagctgaaaacacatttgttgatatttgtcttgtccacattgtgatgttcagtatttgagcttatagtgaactgagcaatcataaataagccacccttctgattgtcgttctactgtatatatatatatatttgagtgttgtttgtgtttcaataaagtcctatgttaaagttggcag

SEQ ID NO: 11289 - protein, 1395 aa, Homo sapiens; identical to SEQ ID NO: 1798

SEQ ID NO: 11290 - DNA, 5249 bp, Homo sapiens
gacaccctcgcggagagcggttcttgccgcatcctgcgcagcccctgcccagtttggtgcagaggcgtggggggcgggactcgtctttgccattcggatcgctgggaaagcggtgggaatccaactgaagagcagccagaggagagctgaagagaggagggggaggccgatgacctgggctctgggcctctgaaggcaagtaggggtctggcgtattctgacaggacacagtgagcatctgtagaggagaggcttgaaataaaggaggagcacgaatattccctggatttctggaggacccccttctgtcagctgtggggcttgacactacttgaacaagaaaaggagggggaaactgcaccacataagtgaagatccacctccagtggctgctctgctggtggtggggttgctgctgacaaccaccctcaacgggtctgcacccatccaggaaatctctgtcttcctcaagcttggttgtgcctgttctacactctatctgtattattgaattactgactgagactgtgtttgggaaggaggctgagtgactactggactggatattgactctaactcttgtttccaagcttatatcctcaatcacctaaagatcagagtgtgaagaaacaaacctgtgacagatctgtggttgaggtttagactgggggaggagtatagtactggactttctttgtaacttgtaccatgactggggcagagattgagtctggtgcccaggtcaagcctgaaaagaagcctggggaagaggttgtaggtggggctgagatagagaatgatgtccctctggtggtcagacccaaggttaggacccaggcccagataatgcctggggcaaggcccaagaataagtccaaggttatgcctggagcaagcaccaaagttgagacaagtgcagtgggtggggcacgccctaagagtaaggccaaggcaatacctgtttcacgatttaaggaagaagcccagatgtgggctcagcccaggtttggtgctgaaagattgtctaagacagagagaaactcccagaccaatatcatagcctctccacttgtcagtactgattctgtcttggttgctaaaacaaagtacctgtctgaggatagagaactggttaatacagacactgagagctttcctagaaggaaggcccattaccaagcaggattccagccttcttttaggtcaaaggaggagaccaatatggggtcctggtgctgtcctaggcctacatccaaacaagaagcctctcctaattctgatttcaaatgggtagacaaatctgtgagttccttgttctggagtggagatgaggtcactgcaaaatttcatcctgggaatagggtaaaagacagtaacagatccatgcacatggccaatcaagaggctaataccatgtctaggtcccaaactaaccaggagctctatattgcatctagttctggttctgaggatgagtctgttaagacaccctggttctgggccagagataaaaccaatacctggtctgggcccagggaagatcccaatagcaggtccaggtttaggtctaagaaagaagtctatgttgaatcaagttctggatctgagcatgaagaccatttggagtcctggtttggggctggaaaggaggccaaattcaggtccaaaatgagagctgggaaggaggccaataacagggccaggcacagggccaagcgagaagcttgcattgatttcatgcctgggtctatagatgtaattaaaaaagagtcctgtttctggcctgaagaaaatgctaataccttttcaaggcccatgatcaagaaagaggccagggccagagcaatgacaaaggaagaggccaaaaccaaggcccgagccagggccaagcaagaagccaggtcagaggaggaagccctcattgggacctggttctgggctacagacgagtccagcatggcagatgaagccagcatagagtccagtctacaagtggaggatgagtccataattgggagttggttctggactgaagaagaggccagtatggggactggggctagcagtaaatccagaccaaggactgatggggagcgtattggtgattccttatttggggctagggaaaagaccagtatgaaaactggggctgaggccacctctgaatctatactagcagctgatgatgaacaggtcattattggttcctggttctgggctggtgaagaggtcaaccaagaggctgaggaagagaccatttttgggtcgtggttctgggtcattgatgcggccagtgtggaatctggtgttggggtcagctgtgagtccaggacaaggtctgaggaagaagaggtcattggtccctggttttggtctggagaacaagttgatatagaggctggaatcggagaagaggccaggccaggagctgaagaagagacaatattcgggtcctggttttgggctgaaaaccagacctatatggattgtagggctgaaactagctgtgacaccatgcaaggggctgaggaggaggagcccattattgggtcctggttttggaccagagtagaagcttgtgtggagggtgatgtcaacagcaagtctagcctggaggacaaggaagaggccatgataccatgttttggagccaaagaagaggtcagtatgaagcatgggactggtgtcagatgcagatttatggcaggggctgaggagaccaataataagtcttgcttctgggcagaaaaagaaccctgtatgtatcctgccggtggaggaagttggaagtctaggccagaggaggaagaggacattgtcaattcgtggttctggtccagaaaatacacaaagccagaggccattatagggtcctggttatgggctacagaagagagtaatatagatgggactggagaaaaggccaagttactgactgaagaggagaccataatcaattcctggttctggaaagaagatgaagccatttcagaggctactgacagagaagagtccaggccagaagctgaggagggggacattattggttcttggttctgggctggagaagaggacagactagagccagctgctgagactagagaagaagacaggctagcagctgagaaagaaggtattgttgggtcctggtttggggccagagaagagaccattagaagagaggctgggtcttgcagcaaatccagtcctaaagctgaagaggaagaagtcattattgggtcctggttctgggaagaagaggccagtccggaggcagtggcaggagtcggctttgagtcaaagcctgggactgaggaggaagaaatcactgttgggtcctggttctggcctgaagaagaagccagtatacaggctggatctcaggcagtagaggaaatggagtcagagactgaagaggaaaccatttttgggtcctggttctgggatggaaaagaagtcagtgaagaagcaggaccatgctgtgtatccaagccagaggatgatgaagagatgattgttgagtcctggttctggtctagagacaaagccattaaggaaactggaactgtggccacctgtgagtccaagccagaaaatgaggaaggggccattgttgggtcttggtttgaggctgaagatgaggtagataacaggactgacaatggaagcaactgtgggtccaggacattagctgatgaagatgaggccatagtggggtcctggttctgggcaggagatgaggcccattttgaatcaaatcctagccccgtgttcagggccatttgcaggtccacgtgttcagttgaacaggagcctgatccttcacgcaggcctcagagttgggaggaggtcactgttcagttcaagcctggtccatggggtagggtcggcttcccatctataagcccctttagatttccgaaagaggcagcatctttattctgtgaaatgtttgggggcaaacccaggaacatggtacttagcccagaaggggaagatcaggaatctttgcttcagcctgatcagcctagtcctgagttcccatttcagtatgatccttcctacaggtcagtccaggaaattcgagagcatcttagggccaaggagagtacagagcctgagagttcatcctgtaactgcatacaatgtgagctgaaaattggttctgaagagtttgaagaactccttttattaatggaaaaaattcgggatccttttattcatgaaatatctaaaatcgcaatgggtatgagaagtgcttctcaatttacccgagatttcattcgagattcaggtgttgtctcacttattgaaaccttgcttaattatccgtcctcccgagttagaacaagttttttggaaaatatgattcgcatggccccaccttatccgaatctaaacataattcagacatacatatgtaaagtgtgtgaggaaacccttgcttatagcgtggattccccggaacagctgtctggaataaggatgattagacatctcactactactactgactatcacacactggttgccaattatatgtctgggtttctctccttattagctacaggcaatgccaaaacaaggtttcatgttttgaaaatgctactgaatttgtctgaaaatcttttcatgacaaaagaactactcagtgctgaagcagtgtcagaatttataggcctctttaacagggaagagacaaatgacaatattcaaattgttcttgcaatatttgagaatattggcaacaatatcaaaaaagaaacagtgttctctgatgatgatttcaatattgagccgcttatttctgcattccacaaagttgagaaatttgctaaggaactgcaaggcaaaacagacaatcaaaatgaccctgaaggggaccaagaaaattagtaatggttaattgctggcctcagattgtccttatgttcctgagttatgatccttgagtaatgctttgattttaatagttggttctgtgttgcaacatatatctttagtgctgacactaactttgtccaactctgtctgtaagctggagcatttttctgatgccagctgaatattagagctgaaaacacatttgttgatatttgtcttgtccacattgtgatgttcagtatttgagcttatagtgaactgagcaatcataaataagccacccttctgattgtcgttctactgtatatatatatatatttgagtgttgtttgtgtttcaataaagtcctatgttaaagttggcag

SEQ ID NO: 11291 - protein, 1395 aa, Homo sapiens; identical to SEQ ID NO: 1798

SEQ ID NO: 11292 - DNA, 5354 bp, Homo sapiens
gacaccctcgcggagagcggttcttgccgcatcctgcgcagcccctgcccagtttggtgcagaggcgtggggggcgggactcgtctttgccattcggatcgctgggaaagcggtgggaatccaactgaagagcagccagaggagagctgaagagaggagggggaggccgatgacctgggctctgggcctctgaagcctggcaacgaggagacgatccgttcggagccgggcgctagagagaggtctggcgtattctgacaggacacagtgagcatctgtagaggagaggcttgaaataaaggaggagcacgaatattccctggatttctggaggcctgctttaaggctggccagttctgcaagaaaggcaaggaggaggagactggctcacacctctggaggacccccttctgtcagctgtggggcttgacactacttgaacaagaaaaggagggggaaactgcaccacataagtgaagatccacctccagtggctgctctgctggtggtggggttgctgctgacaaccaccctcaacgggtctgcacccatccaggaaatctctgtcttcctcaagcttggttgtgcctgttctacactctatctgtattattgaattactgactgagactgtgtttgggaaggaggctgagtgactactggactggatattgactctaactcttgtttccaagcttatatcctcaatcacctaaagatcagagtgtgaagaaacaaacctgtgacagatctgtggttgaggtttagactgggggaggagtatagtactggactttctttgtaacttgtaccatgactggggcagagattgagtctggtgcccaggtcaagcctgaaaagaagcctggggaagaggttgtaggtggggctgagatagagaatgatgtccctctggtggtcagacccaaggttaggacccaggcccagataatgcctggggcaaggcccaagaataagtccaaggttatgcctggagcaagcaccaaagttgagacaagtgcagtgggtggggcacgccctaagagtaaggccaaggcaatacctgtttcacgatttaaggaagaagcccagatgtgggctcagcccaggtttggtgctgaaagattgtctaagacagagagaaactcccagaccaatatcatagcctctccacttgtcagtactgattctgtcttggttgctaaaacaaagtacctgtctgaggatagagaactggttaatacagacactgagagctttcctagaaggaaggcccattaccaagcaggattccagccttcttttaggtcaaaggaggagaccaatatggggtcctggtgctgtcctaggcctacatccaaacaagaagcctctcctaattctgatttcaaatgggtagacaaatctgtgagttccttgttctggagtggagatgaggtcactgcaaaatttcatcctgggaatagggtaaaagacagtaacagatccatgcacatggccaatcaagaggctaataccatgtctaggtcccaaactaaccaggagctctatattgcatctagttctggttctgaggatgagtctgttaagacaccctggttctgggccagagataaaaccaatacctggtctgggcccagggaagatcccaatagcaggtccaggtttaggtctaagaaagaagtctatgttgaatcaagttctggatctgagcatgaagaccatttggagtcctggtttggggctggaaaggaggccaaattcaggtccaaaatgagagctgggaaggaggccaataacagggccaggcacagggccaagcgagaagcttgcattgatttcatgcctgggtctatagatgtaattaaaaaagagtcctgtttctggcctgaagaaaatgctaataccttttcaaggcccatgatcaagaaagaggccagggccagagcaatgacaaaggaagaggccaaaaccaaggcccgagccagggccaagcaagaagccaggtcagaggaggaagccctcattgggacctggttctgggctacagacgagtccagcatggcagatgaagccagcatagagtccagtctacaagtggaggatgagtccataattgggagttggttctggactgaagaagaggccagtatggggactggggctagcagtaaatccagaccaaggactgatggggagcgtattggtgattccttatttggggctagggaaaagaccagtatgaaaactggggctgaggccacctctgaatctatactagcagctgatgatgaacaggtcattattggttcctggttctgggctggtgaagaggtcaaccaagaggctgaggaagagaccatttttgggtcgtggttctgggtcattgatgcggccagtgtggaatctggtgttggggtcagctgtgagtccaggacaaggtctgaggaagaagaggtcattggtccctggttttggtctggagaacaagttgatatagaggctggaatcggagaagaggccaggccaggagctgaagaagagacaatattcgggtcctggttttgggctgaaaaccagacctatatggattgtagggctgaaactagctgtgacaccatgcaaggggctgaggaggaggagcccattattgggtcctggttttggaccagagtagaagcttgtgtggagggtgatgtcaacagcaagtctagcctggaggacaaggaagaggccatgataccatgttttggagccaaagaagaggtcagtatgaagcatgggactggtgtcagatgcagatttatggcaggggctgaggagaccaataataagtcttgcttctgggcagaaaaagaaccctgtatgtatcctgccggtggaggaagttggaagtctaggccagaggaggaagaggacattgtcaattcgtggttctggtccagaaaatacacaaagccagaggccattatagggtcctggttatgggctacagaagagagtaatatagatgggactggagaaaaggccaagttactgactgaagaggagaccataatcaattcctggttctggaaagaagatgaagccatttcagaggctactgacagagaagagtccaggccagaagctgaggagggggacattattggttcttggttctgggctggagaagaggacagactagagccagctgctgagactagagaagaagacaggctagcagctgagaaagaaggtattgttgggtcctggtttggggccagagaagagaccattagaagagaggctgggtcttgcagcaaatccagtcctaaagctgaagaggaagaagtcattattgggtcctggttctgggaagaagaggccagtccggaggcagtggcaggagtcggctttgagtcaaagcctgggactgaggaggaagaaatcactgttgggtcctggttctggcctgaagaagaagccagtatacaggctggatctcaggcagtagaggaaatggagtcagagactgaagaggaaaccatttttgggtcctggttctgggatggaaaagaagtcagtgaagaagcaggaccatgctgtgtatccaagccagaggatgatgaagagatgattgttgagtcctggttctggtctagagacaaagccattaaggaaactggaactgtggccacctgtgagtccaagccagaaaatgaggaaggggccattgttgggtcttggtttgaggctgaagatgaggtagataacaggactgacaatggaagcaactgtgggtccaggacattagctgatgaagatgaggccatagtggggtcctggttctgggcaggagatgaggcccattttgaatcaaatcctagccccgtgttcagggccatttgcaggtccacgtgttcagttgaacaggagcctgatccttcacgcaggcctcagagttgggaggaggtcactgttcagttcaagcctggtccatggggtagggtcggcttcccatctataagcccctttagatttccgaaagaggcagcatctttattctgtgaaatgtttgggggcaaacccaggaacatggtacttagcccagaaggggaagatcaggaatctttgcttcagcctgatcagcctagtcctgagttcccatttcagtatgatccttcctacaggtcagtccaggaaattcgagagcatcttagggccaaggagagtacagagcctgagagttcatcctgtaactgcatacaatgtgagctgaaaattggttctgaagagtttgaagaactccttttattaatggaaaaaattcgggatccttttattcatgaaatatctaaaatcgcaatgggtatgagaagtgcttctcaatttacccgagatttcattcgagattcaggtgttgtctcacttattgaaaccttgcttaattatccgtcctcccgagttagaacaagttttttggaaaatatgattcgcatggccccaccttatccgaatctaaacataattcagacatacatatgtaaagtgtgtgaggaaacccttgcttatagcgtggattccccggaacagctgtctggaataaggatgattagacatctcactactactactgactatcacacactggttgccaattatatgtctgggtttctctccttattagctacaggcaatgccaaaacaaggtttcatgttttgaaaatgctactgaatttgtctgaaaatcttttcatgacaaaagaactactcagtgctgaagcagtgtcagaatttataggcctctttaacagggaagagacaaatgacaatattcaaattgttcttgcaatatttgagaatattggcaacaatatcaaaaaagaaacagtgttctctgatgatgatttcaatattgagccgcttatttctgcattccacaaagttgagaaatttgctaaggaactgcaaggcaaaacagacaatcaaaatgaccctgaaggggaccaagaaaattagtaatggttaattgctggcctcagattgtccttatgttcctgagttatgatccttgagtaatgctttgattttaatagttggttctgtgttgcaacatatatctttagtgctgacactaactttgtccaactctgtctgtaagctggagcatttttctgatgccagctgaatattagagctgaaaacacatttgttgatatttgtcttgtccacattgtgatgttcagtatttgagcttatagtgaactgagcaatcataaataagccacccttctgattgtcgttctactgtatatatatatatatttgagtgttgtttgtgtttcaataaagtcctatgttaaagttggcag

SEQ ID NO: 11293 - protein, 1395 aa, Homo sapiens; identical to SEQ ID NO: 1798

SEQ ID NO: 11294 - DNA, 4624 bp, Homo sapiens
gacaccctcgcggagagcggttcttgccgcatcctgcgcagcccctgcccagtttggtgcagaggcgtggggggcgggactcgtctttgccattcggatcgctgggaaagcggtgggaatccaactgaagagcagccagaggagagctgaagagaggagggggaggccgatgacctgggcttctggtggtcagacccaaggttaggacccaggcccagataatgcctggggcaaggcccaagaataagtccaaggttatgcctggagcaagcaccaaagttgagacaagtgcagtgggtggggcacgccctaagagtaaggccaaggcaatacctgtttcacgatttaaggaagaagcccagatgtgggctcagcccaggtttggtgctgaaagattgtctaagacagagagaaactcccagaccaatatcatagcctctccacttgtcagtactgattctgtcttggttgctaaaacaaagtacctgtctgaggatagagaactggttaatacagacactgagagctttcctagaaggaaggcccattaccaagcaggattccagccttcttttaggtcaaaggaggagaccaatatggggtcctggtgctgtcctaggcctacatccaaacaagaagcctctcctaattctgatttcaaatgggtagacaaatctgtgagttccttgttctggagtggagatgaggtcactgcaaaatttcatcctgggaatagggtaaaagacagtaacagatccatgcacatggccaatcaagaggctaataccatgtctaggtcccaaactaaccaggagctctatattgcatctagttctggttctgaggatgagtctgttaagacaccctggttctgggccagagataaaaccaatacctggtctgggcccagggaagatcccaatagcaggtccaggtttaggtctaagaaagaagtctatgttgaatcaagttctggatctgagcatgaagaccatttggagtcctggtttggggctggaaaggaggccaaattcaggtccaaaatgagagctgggaaggaggccaataacagggccaggcacagggccaagcgagaagcttgcattgatttcatgcctgggtctatagatgtaattaaaaaagagtcctgtttctggcctgaagaaaatgctaataccttttcaaggcccatgatcaagaaagaggccagggccagagcaatgacaaaggaagaggccaaaaccaaggcccgagccagggccaagcaagaagccaggtcagaggaggaagccctcattgggacctggttctgggctacagacgagtccagcatggcagatgaagccagcatagagtccagtctacaagtggaggatgagtccataattgggagttggttctggactgaagaagaggccagtatggggactggggctagcagtaaatccagaccaaggactgatggggagcgtattggtgattccttatttggggctagggaaaagaccagtatgaaaactggggctgaggccacctctgaatctatactagcagctgatgatgaacaggtcattattggttcctggttctgggctggtgaagaggtcaaccaagaggctgaggaagagaccatttttgggtcgtggttctgggtcattgatgcggccagtgtggaatctggtgttggggtcagctgtgagtccaggacaaggtctgaggaagaagaggtcattggtccctggttttggtctggagaacaagttgatatagaggctggaatcggagaagaggccaggccaggagctgaagaagagacaatattcgggtcctggttttgggctgaaaaccagacctatatggattgtagggctgaaactagctgtgacaccatgcaaggggctgaggaggaggagcccattattgggtcctggttttggaccagagtagaagcttgtgtggagggtgatgtcaacagcaagtctagcctggaggacaaggaagaggccatgataccatgttttggagccaaagaagaggtcagtatgaagcatgggactggtgtcagatgcagatttatggcaggggctgaggagaccaataataagtcttgcttctgggcagaaaaagaaccctgtatgtatcctgccggtggaggaagttggaagtctaggccagaggaggaagaggacattgtcaattcgtggttctggtccagaaaatacacaaagccagaggccattatagggtcctggttatgggctacagaagagagtaatatagatgggactggagaaaaggccaagttactgactgaagaggagaccataatcaattcctggttctggaaagaagatgaagccatttcagaggctactgacagagaagagtccaggccagaagctgaggagggggacattattggttcttggttctgggctggagaagaggacagactagagccagctgctgagactagagaagaagacaggctagcagctgagaaagaaggtattgttgggtcctggtttggggccagagaagagaccattagaagagaggctgggtcttgcagcaaatccagtcctaaagctgaagaggaagaagtcattattgggtcctggttctgggaagaagaggccagtccggaggcagtggcaggagtcggctttgagtcaaagcctgggactgaggaggaagaaatcactgttgggtcctggttctggcctgaagaagaagccagtatacaggctggatctcaggcagtagaggaaatggagtcagagactgaagaggaaaccatttttgggtcctggttctgggatggaaaagaagtcagtgaagaagcaggaccatgctgtgtatccaagccagaggatgatgaagagatgattgttgagtcctggttctggtctagagacaaagccattaaggaaactggaactgtggccacctgtgagtccaagccagaaaatgaggaaggggccattgttgggtcttggtttgaggctgaagatgaggtagataacaggactgacaatggaagcaactgtgggtccaggacattagctgatgaagatgaggccatagtggggtcctggttctgggcaggagatgaggcccattttgaatcaaatcctagccccgtgttcagggccatttgcaggtccacgtgttcagttgaacaggagcctgatccttcacgcaggcctcagagttgggaggaggtcactgttcagttcaagcctggtccatggggtagggtcggcttcccatctataagcccctttagatttccgaaagaggcagcatctttattctgtgaaatgtttgggggcaaacccaggaacatggtacttagcccagaaggggaagatcaggaatctttgcttcagcctgatcagcctagtcctgagttcccatttcagtatgatccttcctacaggtcagtccaggaaattcgagagcatcttagggccaaggagagtacagagcctgagagttcatcctgtaactgcatacaatgtgagctgaaaattggttctgaagagtttgaagaactccttttattaatggaaaaaattcgggatccttttattcatgaaatatctaaaatcgcaatgggtatgagaagtgcttctcaatttacccgagatttcattcgagattcaggtgttgtctcacttattgaaaccttgcttaattatccgtcctcccgagttagaacaagttttttggaaaatatgattcgcatggccccaccttatccgaatctaaacataattcagacatacatatgtaaagtgtgtgaggaaacccttgcttatagcgtggattccccggaacagctgtctggaataaggatgattagacatctcactactactactgactatcacacactggttgccaattatatgtctgggtttctctccttattagctacaggcaatgccaaaacaaggtttcatgttttgaaaatgctactgaatttgtctgaaaatcttttcatgacaaaagaactactcagtgctgaagcagtgtcagaatttataggcctctttaacagggaagagacaaatgacaatattcaaattgttcttgcaatatttgagaatattggcaacaatatcaaaaaagaaacagtgttctctgatgatgatttcaatattgagccgcttatttctgcattccacaaagttgagaaatttgctaaggaactgcaaggcaaaacagacaatcaaaatgaccctgaaggggaccaagaaaattagtaatggttaattgctggcctcagattgtccttatgttcctgagttatgatccttgagtaatgctttgattttaatagttggttctgtgttgcaacatatatctttagtgctgacactaactttgtccaactctgtctgtaagctggagcatttttctgatgccagctgaatattagagctgaaaacacatttgttgatatttgtcttgtccacattgtgatgttcagtatttgagcttatagtgaactgagcaatcataaataagccacccttctgattgtcgttctactgtatatatatatatatttgagtgttgtttgtgtttcaataaagtcctatgttaaagttggcag

SEQ ID NO: 11295 - protein, 1349 aa, Homo sapiens
MPGARPKNKSKVMPGASTKVETSAVGGARPKSKAKAIPVSRFKEEAQMWAQPRFGAERLSKTERNSQTNIIASPLVSTDSVLVAKTKYLSEDRELVNTDTESFPRRKAHYQAGFQPSFRSKEETNMGSWCCPRPTSKQEASPNSDFKWVDKSVSSLFWSGDEVTAKFHPGNRVKDSNRSMHMANQEANTMSRSQTNQELYIASSSGSEDESVKTPWFWARDKTNTWSGPREDPNSRSRFRSKKEVYVESSSGSEHEDHLESWFGAGKEAKFRSKMRAGKEANNRARHRAKREACIDFMPGSIDVIKKESCFWPEENANTFSRPMIKKEARARAMTKEEAKTKARARAKQEARSEEEALIGTWFWATDESSMADEASIESSLQVEDESIIGSWFWTEEEASMGTGASSKSRPRTDGERIGDSLFGAREKTSMKTGAEATSESILAADDEQVIIGSWFWAGEEVNQEAEEETIFGSWFWVIDAASVESGVGVSCESRTRSEEEEVIGPWFWSGEQVDIEAGIGEEARPGAEEETIFGSWFWAENQTYMDCRAETSCDTMQGAEEEEPIIGSWFWTRVEACVEGDVNSKSSLEDKEEAMIPCFGAKEEVSMKHGTGVRCRFMAGAEETNNKSCFWAEKEPCMYPAGGGSWKSRPEEEEDIVNSWFWSRKYTKPEAIIGSWLWATEESNIDGTGEKAKLLTEEETIINSWFWKEDEAISEATDREESRPEAEEGDIIGSWFWAGEEDRLEPAAETREEDRLAAEKEGIVGSWFGAREETIRREAGSCSKSSPKAEEEEVIIGSWFWEEEASPEAVAGVGFESKPGTEEEEITVGSWFWPEEEASIQAGSQAVEEMESETEEETIFGSWFWDGKEVSEEAGPCCVSKPEDDEEMIVESWFWSRDKAIKETGTVATCESKPENEEGAIVGSWFEAEDEVDNRTDNGSNCGSRTLADEDEAIVGSWFWAGDEAHFESNPSPVFRAICRSTCSVEQEPDPSRRPQSWEEVTVQFKPGPWGRVGFPSISPFRFPKEAASLFCEMFGGKPRNMVLSPEGEDQESLLQPDQPSPEFPFQYDPSYRSVQEIREHLRAKESTEPESSSCNCIQCELKIGSEEFEELLLLMEKIRDPFIHEISKIAMGMRSASQFTRDFIRDSGVVSLIETLLNYPSSRVRTSFLENMIRMAPPYPNLNIIQTYICKVCEETLAYSVDSPEQLSGIRMIRHLTTTTDYHTLVANYMSGFLSLLATGNAKTRFHVLKMLLNLSENLFMTKELLSAEAVSEFIGLFNREETNDNIQIVLAIFENIGNNIKKETVFSDDDFNIEPLISAFHKVEKFAKELQGKTDNQNDPEGDQEN

SEQ ID NO: 11296 - DNA, 5148 bp, Homo sapiens
gacaccctcgcggagagcggttcttgccgcatcctgcgcagcccctgcccagtttggtgcagaggcgtggggggcgggactcgtctttgccattcggatcgctgggaaagcggtgggaatccaactgaagagcagccagaggagagctgaagagaggagggggaggccgatgacctgggctctgggcctctgaaggacccccttctgtcagctgtggggcttgacactacttgaacaagaaaaggagggggaaactgcaccacataagtgaagatccacctccagtggctgctctgctggtggtggggttgctgctgacaaccaccctcaacgggtctgcacccatccaggaaatctctgtcttcctcaagcttggttgtgcctgttctacactctatctgtattattgaattactgactgagactgtgtttgggaaggaggctgagtgactactggactggatattgactctaactcttgtttccaagcttatatcctcaatcacctaaagatcagagtgtgaagaaacaaacctgtgacagatctgtggttgaggtttagactgggggaggagtatagtactggactttctttgtaacttgtaccatgactggggcagagattgagtctggtgcccaggtcaagcctgaaaagaagcctggggaagaggttgtaggtggggctgagatagagaatgatgtccctctggtggtcagacccaaggttaggacccaggcccagataatgcctggggcaaggcccaagaataagtccaaggttatgcctggagcaagcaccaaagttgagacaagtgcagtgggtggggcacgccctaagagtaaggccaaggcaatacctgtttcacgatttaaggaagaagcccagatgtgggctcagcccaggtttggtgctgaaagattgtctaagacagagagaaactcccagaccaatatcatagcctctccacttgtcagtactgattctgtcttggttgctaaaacaaagtacctgtctgaggatagagaactggttaatacagacactgagagctttcctagaaggaaggcccattaccaagcaggattccagccttcttttaggtcaaaggaggagaccaatatggggtcctggtgctgtcctaggcctacatccaaacaagaagcctctcctaattctgatttcaaatgggtagacaaatctgtgagttccttgttctggagtggagatgaggtcactgcaaaatttcatcctgggaatagggtaaaagacagtaacagatccatgcacatggccaatcaagaggctaataccatgtctaggtcccaaactaaccaggagctctatattgcatctagttctggttctgaggatgagtctgttaagacaccctggttctgggccagagataaaaccaatacctggtctgggcccagggaagatcccaatagcaggtccaggtttaggtctaagaaagaagtctatgttgaatcaagttctggatctgagcatgaagaccatttggagtcctggtttggggctggaaaggaggccaaattcaggtccaaaatgagagctgggaaggaggccaataacagggccaggcacagggccaagcgagaagcttgcattgatttcatgcctgggtctatagatgtaattaaaaaagagtcctgtttctggcctgaagaaaatgctaataccttttcaaggcccatgatcaagaaagaggccagggccagagcaatgacaaaggaagaggccaaaaccaaggcccgagccagggccaagcaagaagccaggtcagaggaggaagccctcattgggacctggttctgggctacagacgagtccagcatggcagatgaagccagcatagagtccagtctacaagtggaggatgagtccataattgggagttggttctggactgaagaagaggccagtatggggactggggctagcagtaaatccagaccaaggactgatggggagcgtattggtgattccttatttggggctagggaaaagaccagtatgaaaactggggctgaggccacctctgaatctatactagcagctgatgatgaacaggtcattattggttcctggttctgggctggtgaagaggtcaaccaagaggctgaggaagagaccatttttgggtcgtggttctgggtcattgatgcggccagtgtggaatctggtgttggggtcagctgtgagtccaggacaaggtctgaggaagaagaggtcattggtccctggttttggtctggagaacaagttgatatagaggctggaatcggagaagaggccaggccaggagctgaagaagagacaatattcgggtcctggttttgggctgaaaaccagacctatatggattgtagggctgaaactagctgtgacaccatgcaaggggctgaggaggaggagcccattattgggtcctggttttggaccagagtagaagcttgtgtggagggtgatgtcaacagcaagtctagcctggaggacaaggaagaggccatgataccatgttttggagccaaagaagaggtcagtatgaagcatgggactggtgtcagatgcagatttatggcaggggctgaggagaccaataataagtcttgcttctgggcagaaaaagaaccctgtatgtatcctgccggtggaggaagttggaagtctaggccagaggaggaagaggacattgtcaattcgtggttctggtccagaaaatacacaaagccagaggccattatagggtcctggttatgggctacagaagagagtaatatagatgggactggagaaaaggccaagttactgactgaagaggagaccataatcaattcctggttctggaaagaagatgaagccatttcagaggctactgacagagaagagtccaggccagaagctgaggagggggacattattggttcttggttctgggctggagaagaggacagactagagccagctgctgagactagagaagaagacaggctagcagctgagaaagaaggtattgttgggtcctggtttggggccagagaagagaccattagaagagaggctgggtcttgcagcaaatccagtcctaaagctgaagaggaagaagtcattattgggtcctggttctgggaagaagaggccagtccggaggcagtggcaggagtcggctttgagtcaaagcctgggactgaggaggaagaaatcactgttgggtcctggttctggcctgaagaagaagccagtatacaggctggatctcaggcagtagaggaaatggagtcagagactgaagaggaaaccatttttgggtcctggttctgggatggaaaagaagtcagtgaagaagcaggaccatgctgtgtatccaagccagaggatgatgaagagatgattgttgagtcctggttctggtctagagacaaagccattaaggaaactggaactgtggccacctgtgagtccaagccagaaaatgaggaaggggccattgttgggtcttggtttgaggctgaagatgaggtagataacaggactgacaatggaagcaactgtgggtccaggacattagctgatgaagatgaggccatagtggggtcctggttctgggcaggagatgaggcccattttgaatcaaatcctagccccgtgttcagggccatttgcaggtccacgtgttcagttgaacaggagcctgatccttcacgcaggcctcagagttgggaggaggtcactgttcagttcaagcctggtccatggggtagggtcggcttcccatctataagcccctttagatttccgaaagaggcagcatctttattctgtgaaatgtttgggggcaaacccaggaacatggtacttagcccagaaggggaagatcaggaatctttgcttcagcctgatcagcctagtcctgagttcccatttcagtatgatccttcctacaggtcagtccaggaaattcgagagcatcttagggccaaggagagtacagagcctgagagttcatcctgtaactgcatacaatgtgagctgaaaattggttctgaagagtttgaagaactccttttattaatggaaaaaattcgggatccttttattcatgaaatatctaaaatcgcaatgggtatgagaagtgcttctcaatttacccgagatttcattcgagattcaggtgttgtctcacttattgaaaccttgcttaattatccgtcctcccgagttagaacaagttttttggaaaatatgattcgcatggccccaccttatccgaatctaaacataattcagacatacatatgtaaagtgtgtgaggaaacccttgcttatagcgtggattccccggaacagctgtctggaataaggatgattagacatctcactactactactgactatcacacactggttgccaattatatgtctgggtttctctccttattagctacaggcaatgccaaaacaaggtttcatgttttgaaaatgctactgaatttgtctgaaaatcttttcatgacaaaagaactactcagtgctgaagcagtgtcagaatttataggcctctttaacagggaagagacaaatgacaatattcaaattgttcttgcaatatttgagaatattggcaacaatatcaaaaaagaaacagtgttctctgatgatgatttcaatattgagccgcttatttctgcattccacaaagttgagaaatttgctaaggaactgcaaggcaaaacagacaatcaaaatgaccctgaaggggaccaagaaaattagtaatggttaattgctggcctcagattgtccttatgttcctgagttatgatccttgagtaatgctttgattttaatagttggttctgtgttgcaacatatatctttagtgctgacactaactttgtccaactctgtctgtaagctggagcatttttctgatgccagctgaatattagagctgaaaacacatttgttgatatttgtcttgtccacattgtgatgttcagtatttgagcttatagtgaactgagcaatcataaataagccacccttctgattgtcgttctactgtatatatatatatatttgagtgttgtttgtgtttcaataaagtcctatgttaaagttggcag

SEQ ID NO: 11297 - protein, 1395 aa, Homo sapiens; identical to SEQ ID NO: 1798

SEQ ID NO: 11298 - DNA, 5128 bp, Homo sapiens
gtgcgcagtgcccgagatccctggctatggggaggcggtgactggtgcgggccaggccggaccaagggctgaggggctggctccagaggcaccgtcagatcgtctggaggagaaccgcgctgaccgcttcccagccagctttgcaggcgcccgcgcgcagccctcgacggtttcggacccccttctgtcagctgtggggcttgacactacttgaacaagaaaaggagggggaaactgcaccacataagtgaagatccacctccagtggctgctctgctggtggtggggttgctgctgacaaccaccctcaacgggtctgcacccatccaggaaatctctgtcttcctcaagcttggttgtgcctgttctacactctatctgtattattgaattactgactgagactgtgtttgggaaggaggctgagtgactactggactggatattgactctaactcttgtttccaagcttatatcctcaatcacctaaagatcagagtgtgaagaaacaaacctgtgacagatctgtggttgaggtttagactgggggaggagtatagtactggactttctttgtaacttgtaccatgactggggcagagattgagtctggtgcccaggtcaagcctgaaaagaagcctggggaagaggttgtaggtggggctgagatagagaatgatgtccctctggtggtcagacccaaggttaggacccaggcccagataatgcctggggcaaggcccaagaataagtccaaggttatgcctggagcaagcaccaaagttgagacaagtgcagtgggtggggcacgccctaagagtaaggccaaggcaatacctgtttcacgatttaaggaagaagcccagatgtgggctcagcccaggtttggtgctgaaagattgtctaagacagagagaaactcccagaccaatatcatagcctctccacttgtcagtactgattctgtcttggttgctaaaacaaagtacctgtctgaggatagagaactggttaatacagacactgagagctttcctagaaggaaggcccattaccaagcaggattccagccttcttttaggtcaaaggaggagaccaatatggggtcctggtgctgtcctaggcctacatccaaacaagaagcctctcctaattctgatttcaaatgggtagacaaatctgtgagttccttgttctggagtggagatgaggtcactgcaaaatttcatcctgggaatagggtaaaagacagtaacagatccatgcacatggccaatcaagaggctaataccatgtctaggtcccaaactaaccaggagctctatattgcatctagttctggttctgaggatgagtctgttaagacaccctggttctgggccagagataaaaccaatacctggtctgggcccagggaagatcccaatagcaggtccaggtttaggtctaagaaagaagtctatgttgaatcaagttctggatctgagcatgaagaccatttggagtcctggtttggggctggaaaggaggccaaattcaggtccaaaatgagagctgggaaggaggccaataacagggccaggcacagggccaagcgagaagcttgcattgatttcatgcctgggtctatagatgtaattaaaaaagagtcctgtttctggcctgaagaaaatgctaataccttttcaaggcccatgatcaagaaagaggccagggccagagcaatgacaaaggaagaggccaaaaccaaggcccgagccagggccaagcaagaagccaggtcagaggaggaagccctcattgggacctggttctgggctacagacgagtccagcatggcagatgaagccagcatagagtccagtctacaagtggaggatgagtccataattgggagttggttctggactgaagaagaggccagtatggggactggggctagcagtaaatccagaccaaggactgatggggagcgtattggtgattccttatttggggctagggaaaagaccagtatgaaaactggggctgaggccacctctgaatctatactagcagctgatgatgaacaggtcattattggttcctggttctgggctggtgaagaggtcaaccaagaggctgaggaagagaccatttttgggtcgtggttctgggtcattgatgcggccagtgtggaatctggtgttggggtcagctgtgagtccaggacaaggtctgaggaagaagaggtcattggtccctggttttggtctggagaacaagttgatatagaggctggaatcggagaagaggccaggccaggagctgaagaagagacaatattcgggtcctggttttgggctgaaaaccagacctatatggattgtagggctgaaactagctgtgacaccatgcaaggggctgaggaggaggagcccattattgggtcctggttttggaccagagtagaagcttgtgtggagggtgatgtcaacagcaagtctagcctggaggacaaggaagaggccatgataccatgttttggagccaaagaagaggtcagtatgaagcatgggactggtgtcagatgcagatttatggcaggggctgaggagaccaataataagtcttgcttctgggcagaaaaagaaccctgtatgtatcctgccggtggaggaagttggaagtctaggccagaggaggaagaggacattgtcaattcgtggttctggtccagaaaatacacaaagccagaggccattatagggtcctggttatgggctacagaagagagtaatatagatgggactggagaaaaggccaagttactgactgaagaggagaccataatcaattcctggttctggaaagaagatgaagccatttcagaggctactgacagagaagagtccaggccagaagctgaggagggggacattattggttcttggttctgggctggagaagaggacagactagagccagctgctgagactagagaagaagacaggctagcagctgagaaagaaggtattgttgggtcctggtttggggccagagaagagaccattagaagagaggctgggtcttgcagcaaatccagtcctaaagctgaagaggaagaagtcattattgggtcctggttctgggaagaagaggccagtccggaggcagtggcaggagtcggctttgagtcaaagcctgggactgaggaggaagaaatcactgttgggtcctggttctggcctgaagaagaagccagtatacaggctggatctcaggcagtagaggaaatggagtcagagactgaagaggaaaccatttttgggtcctggttctgggatggaaaagaagtcagtgaagaagcaggaccatgctgtgtatccaagccagaggatgatgaagagatgattgttgagtcctggttctggtctagagacaaagccattaaggaaactggaactgtggccacctgtgagtccaagccagaaaatgaggaaggggccattgttgggtcttggtttgaggctgaagatgaggtagataacaggactgacaatggaagcaactgtgggtccaggacattagctgatgaagatgaggccatagtggggtcctggttctgggcaggagatgaggcccattttgaatcaaatcctagccccgtgttcagggccatttgcaggtccacgtgttcagttgaacaggagcctgatccttcacgcaggcctcagagttgggaggaggtcactgttcagttcaagcctggtccatggggtagggtcggcttcccatctataagcccctttagatttccgaaagaggcagcatctttattctgtgaaatgtttgggggcaaacccaggaacatggtacttagcccagaaggggaagatcaggaatctttgcttcagcctgatcagcctagtcctgagttcccatttcagtatgatccttcctacaggtcagtccaggaaattcgagagcatcttagggccaaggagagtacagagcctgagagttcatcctgtaactgcatacaatgtgagctgaaaattggttctgaagagtttgaagaactccttttattaatggaaaaaattcgggatccttttattcatgaaatatctaaaatcgcaatgggtatgagaagtgcttctcaatttacccgagatttcattcgagattcaggtgttgtctcacttattgaaaccttgcttaattatccgtcctcccgagttagaacaagttttttggaaaatatgattcgcatggccccaccttatccgaatctaaacataattcagacatacatatgtaaagtgtgtgaggaaacccttgcttatagcgtggattccccggaacagctgtctggaataaggatgattagacatctcactactactactgactatcacacactggttgccaattatatgtctgggtttctctccttattagctacaggcaatgccaaaacaaggtttcatgttttgaaaatgctactgaatttgtctgaaaatcttttcatgacaaaagaactactcagtgctgaagcagtgtcagaatttataggcctctttaacagggaagagacaaatgacaatattcaaattgttcttgcaatatttgagaatattggcaacaatatcaaaaaagaaacagtgttctctgatgatgatttcaatattgagccgcttatttctgcattccacaaagttgagaaatttgctaaggaactgcaaggcaaaacagacaatcaaaatgaccctgaaggggaccaagaaaattagtaatggttaattgctggcctcagattgtccttatgttcctgagttatgatccttgagtaatgctttgattttaatagttggttctgtgttgcaacatatatctttagtgctgacactaactttgtccaactctgtctgtaagctggagcatttttctgatgccagctgaatattagagctgaaaacacatttgttgatatttgtcttgtccacattgtgatgttcagtatttgagcttatagtgaactgagcaatcataaataagccacccttctgattgtcgttctactgtatatatatatatatttgagtgttgtttgtgtttcaataaagtcctatgttaaagttggcag

SEQ ID NO: 11299 - protein, 1395 aa, Homo sapiens; identical to SEQ ID NO: 1798

SEQ ID NO: 11300 - DNA, 5177 bp, Homo sapiens
cgtgtcctgggtgctgtcccttcccacagactccaggttgatgtcaaagtctgtctgcgcggtaggtctggcgtattctgacaggacacagtgagcatctgtagaggagaggcttgaaataaaggaggagcacgaatattccctggatttctggaggcctgctttaaggctggccagttctgcaagaaaggcaaggaggaggagactggctcacacctctggaggacccccttctgtcagctgtggggcttgacactacttgaacaagaaaaggagggggaaactgcaccacataagtgaagatccacctccagtggctgctctgctggtggtggggttgctgctgacaaccaccctcaacgggtctgcacccatccaggaaatctctgtcttcctcaagcttggttgtgcctgttctacactctatctgtattattgaattactgactgagactgtgtttgggaaggaggctgagtgactactggactggatattgactctaactcttgtttccaagcttatatcctcaatcacctaaagatcagagtgtgaagaaacaaacctgtgacagatctgtggttgaggtttagactgggggaggagtatagtactggactttctttgtaacttgtaccatgactggggcagagattgagtctggtgcccaggtcaagcctgaaaagaagcctggggaagaggttgtaggtggggctgagatagagaatgatgtccctctggtggtcagacccaaggttaggacccaggcccagataatgcctggggcaaggcccaagaataagtccaaggttatgcctggagcaagcaccaaagttgagacaagtgcagtgggtggggcacgccctaagagtaaggccaaggcaatacctgtttcacgatttaaggaagaagcccagatgtgggctcagcccaggtttggtgctgaaagattgtctaagacagagagaaactcccagaccaatatcatagcctctccacttgtcagtactgattctgtcttggttgctaaaacaaagtacctgtctgaggatagagaactggttaatacagacactgagagctttcctagaaggaaggcccattaccaagcaggattccagccttcttttaggtcaaaggaggagaccaatatggggtcctggtgctgtcctaggcctacatccaaacaagaagcctctcctaattctgatttcaaatgggtagacaaatctgtgagttccttgttctggagtggagatgaggtcactgcaaaatttcatcctgggaatagggtaaaagacagtaacagatccatgcacatggccaatcaagaggctaataccatgtctaggtcccaaactaaccaggagctctatattgcatctagttctggttctgaggatgagtctgttaagacaccctggttctgggccagagataaaaccaatacctggtctgggcccagggaagatcccaatagcaggtccaggtttaggtctaagaaagaagtctatgttgaatcaagttctggatctgagcatgaagaccatttggagtcctggtttggggctggaaaggaggccaaattcaggtccaaaatgagagctgggaaggaggccaataacagggccaggcacagggccaagcgagaagcttgcattgatttcatgcctgggtctatagatgtaattaaaaaagagtcctgtttctggcctgaagaaaatgctaataccttttcaaggcccatgatcaagaaagaggccagggccagagcaatgacaaaggaagaggccaaaaccaaggcccgagccagggccaagcaagaagccaggtcagaggaggaagccctcattgggacctggttctgggctacagacgagtccagcatggcagatgaagccagcatagagtccagtctacaagtggaggatgagtccataattgggagttggttctggactgaagaagaggccagtatggggactggggctagcagtaaatccagaccaaggactgatggggagcgtattggtgattccttatttggggctagggaaaagaccagtatgaaaactggggctgaggccacctctgaatctatactagcagctgatgatgaacaggtcattattggttcctggttctgggctggtgaagaggtcaaccaagaggctgaggaagagaccatttttgggtcgtggttctgggtcattgatgcggccagtgtggaatctggtgttggggtcagctgtgagtccaggacaaggtctgaggaagaagaggtcattggtccctggttttggtctggagaacaagttgatatagaggctggaatcggagaagaggccaggccaggagctgaagaagagacaatattcgggtcctggttttgggctgaaaaccagacctatatggattgtagggctgaaactagctgtgacaccatgcaaggggctgaggaggaggagcccattattgggtcctggttttggaccagagtagaagcttgtgtggagggtgatgtcaacagcaagtctagcctggaggacaaggaagaggccatgataccatgttttggagccaaagaagaggtcagtatgaagcatgggactggtgtcagatgcagatttatggcaggggctgaggagaccaataataagtcttgcttctgggcagaaaaagaaccctgtatgtatcctgccggtggaggaagttggaagtctaggccagaggaggaagaggacattgtcaattcgtggttctggtccagaaaatacacaaagccagaggccattatagggtcctggttatgggctacagaagagagtaatatagatgggactggagaaaaggccaagttactgactgaagaggagaccataatcaattcctggttctggaaagaagatgaagccatttcagaggctactgacagagaagagtccaggccagaagctgaggagggggacattattggttcttggttctgggctggagaagaggacagactagagccagctgctgagactagagaagaagacaggctagcagctgagaaagaaggtattgttgggtcctggtttggggccagagaagagaccattagaagagaggctgggtcttgcagcaaatccagtcctaaagctgaagaggaagaagtcattattgggtcctggttctgggaagaagaggccagtccggaggcagtggcaggagtcggctttgagtcaaagcctgggactgaggaggaagaaatcactgttgggtcctggttctggcctgaagaagaagccagtatacaggctggatctcaggcagtagaggaaatggagtcagagactgaagaggaaaccatttttgggtcctggttctgggatggaaaagaagtcagtgaagaagcaggaccatgctgtgtatccaagccagaggatgatgaagagatgattgttgagtcctggttctggtctagagacaaagccattaaggaaactggaactgtggccacctgtgagtccaagccagaaaatgaggaaggggccattgttgggtcttggtttgaggctgaagatgaggtagataacaggactgacaatggaagcaactgtgggtccaggacattagctgatgaagatgaggccatagtggggtcctggttctgggcaggagatgaggcccattttgaatcaaatcctagccccgtgttcagggccatttgcaggtccacgtgttcagttgaacaggagcctgatccttcacgcaggcctcagagttgggaggaggtcactgttcagttcaagcctggtccatggggtagggtcggcttcccatctataagcccctttagatttccgaaagaggcagcatctttattctgtgaaatgtttgggggcaaacccaggaacatggtacttagcccagaaggggaagatcaggaatctttgcttcagcctgatcagcctagtcctgagttcccatttcagtatgatccttcctacaggtcagtccaggaaattcgagagcatcttagggccaaggagagtacagagcctgagagttcatcctgtaactgcatacaatgtgagctgaaaattggttctgaagagtttgaagaactccttttattaatggaaaaaattcgggatccttttattcatgaaatatctaaaatcgcaatgggtatgagaagtgcttctcaatttacccgagatttcattcgagattcaggtgttgtctcacttattgaaaccttgcttaattatccgtcctcccgagttagaacaagttttttggaaaatatgattcgcatggccccaccttatccgaatctaaacataattcagacatacatatgtaaagtgtgtgaggaaacccttgcttatagcgtggattccccggaacagctgtctggaataaggatgattagacatctcactactactactgactatcacacactggttgccaattatatgtctgggtttctctccttattagctacaggcaatgccaaaacaaggtttcatgttttgaaaatgctactgaatttgtctgaaaatcttttcatgacaaaagaactactcagtgctgaagcagtgtcagaatttataggcctctttaacagggaagagacaaatgacaatattcaaattgttcttgcaatatttgagaatattggcaacaatatcaaaaaagaaacagtgttctctgatgatgatttcaatattgagccgcttatttctgcattccacaaagttgagaaatttgctaaggaactgcaaggcaaaacagacaatcaaaatgaccctgaaggggaccaagaaaattagtaatggttaattgctggcctcagattgtccttatgttcctgagttatgatccttgagtaatgctttgattttaatagttggttctgtgttgcaacatatatctttagtgctgacactaactttgtccaactctgtctgtaagctggagcatttttctgatgccagctgaatattagagctgaaaacacatttgttgatatttgtcttgtccacattgtgatgttcagtatttgagcttatagtgaactgagcaatcataaataagccacccttctgattgtcgttctactgtatatatatatatatttgagtgttgtttgtgtttcaataaagtcctatgttaaagttggcag

SEQ ID NO: 11301 - protein, 1395 aa, Homo sapiens; identical to SEQ ID NO: 1798

SEQ ID NO: 11302 - DNA, 5099 bp, Homo sapiens
gtgctgtcccttcccacagactccaggttgatgtcaaagtctgtctgcgcggtaggtctggcgtattctgacaggacacagtgagcatctgtagaggagaggcttgaaataaaggaggagcacgaatattccctggatttctggaggacccccttctgtcagctgtggggcttgacactacttgaacaagaaaaggagggggaaactgcaccacataagtgaagatccacctccagtggctgctctgctggtggtggggttgctgctgacaaccaccctcaacgggtctgcacccatccaggaaatctctgtcttcctcaagcttggttgtgcctgttctacactctatctgtattattgaattactgactgagactgtgtttgggaaggaggctgagtgactactggactggatattgactctaactcttgtttccaagcttatatcctcaatcacctaaagatcagagtgtgaagaaacaaacctgtgacagatctgtggttgaggtttagactgggggaggagtatagtactggactttctttgtaacttgtaccatgactggggcagagattgagtctggtgcccaggtcaagcctgaaaagaagcctggggaagaggttgtaggtggggctgagatagagaatgatgtccctctggtggtcagacccaaggttaggacccaggcccagataatgcctggggcaaggcccaagaataagtccaaggttatgcctggagcaagcaccaaagttgagacaagtgcagtgggtggggcacgccctaagagtaaggccaaggcaatacctgtttcacgatttaaggaagaagcccagatgtgggctcagcccaggtttggtgctgaaagattgtctaagacagagagaaactcccagaccaatatcatagcctctccacttgtcagtactgattctgtcttggttgctaaaacaaagtacctgtctgaggatagagaactggttaatacagacactgagagctttcctagaaggaaggcccattaccaagcaggattccagccttcttttaggtcaaaggaggagaccaatatggggtcctggtgctgtcctaggcctacatccaaacaagaagcctctcctaattctgatttcaaatgggtagacaaatctgtgagttccttgttctggagtggagatgaggtcactgcaaaatttcatcctgggaatagggtaaaagacagtaacagatccatgcacatggccaatcaagaggctaataccatgtctaggtcccaaactaaccaggagctctatattgcatctagttctggttctgaggatgagtctgttaagacaccctggttctgggccagagataaaaccaatacctggtctgggcccagggaagatcccaatagcaggtccaggtttaggtctaagaaagaagtctatgttgaatcaagttctggatctgagcatgaagaccatttggagtcctggtttggggctggaaaggaggccaaattcaggtccaaaatgagagctgggaaggaggccaataacagggccaggcacagggccaagcgagaagcttgcattgatttcatgcctgggtctatagatgtaattaaaaaagagtcctgtttctggcctgaagaaaatgctaataccttttcaaggcccatgatcaagaaagaggccagggccagagcaatgacaaaggaagaggccaaaaccaaggcccgagccagggccaagcaagaagccaggtcagaggaggaagccctcattgggacctggttctgggctacagacgagtccagcatggcagatgaagccagcatagagtccagtctacaagtggaggatgagtccataattgggagttggttctggactgaagaagaggccagtatggggactggggctagcagtaaatccagaccaaggactgatggggagcgtattggtgattccttatttggggctagggaaaagaccagtatgaaaactggggctgaggccacctctgaatctatactagcagctgatgatgaacaggtcattattggttcctggttctgggctggtgaagaggtcaaccaagaggctgaggaagagaccatttttgggtcgtggttctgggtcattgatgcggccagtgtggaatctggtgttggggtcagctgtgagtccaggacaaggtctgaggaagaagaggtcattggtccctggttttggtctggagaacaagttgatatagaggctggaatcggagaagaggccaggccaggagctgaagaagagacaatattcgggtcctggttttgggctgaaaaccagacctatatggattgtagggctgaaactagctgtgacaccatgcaaggggctgaggaggaggagcccattattgggtcctggttttggaccagagtagaagcttgtgtggagggtgatgtcaacagcaagtctagcctggaggacaaggaagaggccatgataccatgttttggagccaaagaagaggtcagtatgaagcatgggactggtgtcagatgcagatttatggcaggggctgaggagaccaataataagtcttgcttctgggcagaaaaagaaccctgtatgtatcctgccggtggaggaagttggaagtctaggccagaggaggaagaggacattgtcaattcgtggttctggtccagaaaatacacaaagccagaggccattatagggtcctggttatgggctacagaagagagtaatatagatgggactggagaaaaggccaagttactgactgaagaggagaccataatcaattcctggttctggaaagaagatgaagccatttcagaggctactgacagagaagagtccaggccagaagctgaggagggggacattattggttcttggttctgggctggagaagaggacagactagagccagctgctgagactagagaagaagacaggctagcagctgagaaagaaggtattgttgggtcctggtttggggccagagaagagaccattagaagagaggctgggtcttgcagcaaatccagtcctaaagctgaagaggaagaagtcattattgggtcctggttctgggaagaagaggccagtccggaggcagtggcaggagtcggctttgagtcaaagcctgggactgaggaggaagaaatcactgttgggtcctggttctggcctgaagaagaagccagtatacaggctggatctcaggcagtagaggaaatggagtcagagactgaagaggaaaccatttttgggtcctggttctgggatggaaaagaagtcagtgaagaagcaggaccatgctgtgtatccaagccagaggatgatgaagagatgattgttgagtcctggttctggtctagagacaaagccattaaggaaactggaactgtggccacctgtgagtccaagccagaaaatgaggaaggggccattgttgggtcttggtttgaggctgaagatgaggtagataacaggactgacaatggaagcaactgtgggtccaggacattagctgatgaagatgaggccatagtggggtcctggttctgggcaggagatgaggcccattttgaatcaaatcctagccccgtgttcagggccatttgcaggtccacgtgttcagttgaacaggagcctgatccttcacgcaggcctcagagttgggaggaggtcactgttcagttcaagcctggtccatggggtagggtcggcttcccatctataagcccctttagatttccgaaagaggcagcatctttattctgtgaaatgtttgggggcaaacccaggaacatggtacttagcccagaaggggaagatcaggaatctttgcttcagcctgatcagcctagtcctgagttcccatttcagtatgatccttcctacaggtcagtccaggaaattcgagagcatcttagggccaaggagagtacagagcctgagagttcatcctgtaactgcatacaatgtgagctgaaaattggttctgaagagtttgaagaactccttttattaatggaaaaaattcgggatccttttattcatgaaatatctaaaatcgcaatgggtatgagaagtgcttctcaatttacccgagatttcattcgagattcaggtgttgtctcacttattgaaaccttgcttaattatccgtcctcccgagttagaacaagttttttggaaaatatgattcgcatggccccaccttatccgaatctaaacataattcagacatacatatgtaaagtgtgtgaggaaacccttgcttatagcgtggattccccggaacagctgtctggaataaggatgattagacatctcactactactactgactatcacacactggttgccaattatatgtctgggtttctctccttattagctacaggcaatgccaaaacaaggtttcatgttttgaaaatgctactgaatttgtctgaaaatcttttcatgacaaaagaactactcagtgctgaagcagtgtcagaatttataggcctctttaacagggaagagacaaatgacaatattcaaattgttcttgcaatatttgagaatattggcaacaatatcaaaaaagaaacagtgttctctgatgatgatttcaatattgagccgcttatttctgcattccacaaagttgagaaatttgctaaggaactgcaaggcaaaacagacaatcaaaatgaccctgaaggggaccaagaaaattagtaatggttaattgctggcctcagattgtccttatgttcctgagttatgatccttgagtaatgctttgattttaatagttggttctgtgttgcaacatatatctttagtgctgacactaactttgtccaactctgtctgtaagctggagcatttttctgatgccagctgaatattagagctgaaaacacatttgttgatatttgtcttgtccacattgtgatgttcagtatttgagcttatagtgaactgagcaatcataaataagccacccttctgattgtcgttctactgtatatatatatatatttgagtgttgtttgtgtttcaataaagtcctatgttaaagttggcag

SEQ ID NO: 11303 - protein, 1395 aa, Homo sapiens; identical to SEQ ID NO: 1798

SEQ ID NO: 11304 - DNA, 5328 bp, Homo sapiens
ggccagttctgcaagaaaggcaaggaggaggagactggctcacacctctggaggttggtgagaagggggagggggcaattcaggggacagttggagaaagagagcatggcaggtggctttgagaccagtgggtgcagacccacttctactctgctggatttgcacagtgccagcatcctttttatttcttgcaggggacatgagataggtgtaggttgtgttgtgactcagaaagacctgagagcagggaccaggacacaggaaaccatagatacattgaacccttgaatgggaagacagatatttgtcacaggagccagagtgcttgcctatctaccattctccattctctcctgtatgtttacttgtctgtaggacccccttctgtcagctgtggggcttgacactacttgaacaagaaaaggagggggaaactgcaccacataagtgaagatccacctccagtggctgctctgctggtggtggggttgctgctgacaaccaccctcaacgggtctgcacccatccaggaaatctctgtcttcctcaagcttggttgtgcctgttctacactctatctgtattattgaattactgactgagactgtgtttgggaaggaggctgagtgactactggactggatattgactctaactcttgtttccaagcttatatcctcaatcacctaaagatcagagtgtgaagaaacaaacctgtgacagatctgtggttgaggtttagactgggggaggagtatagtactggactttctttgtaacttgtaccatgactggggcagagattgagtctggtgcccaggtcaagcctgaaaagaagcctggggaagaggttgtaggtggggctgagatagagaatgatgtccctctggtggtcagacccaaggttaggacccaggcccagataatgcctggggcaaggcccaagaataagtccaaggttatgcctggagcaagcaccaaagttgagacaagtgcagtgggtggggcacgccctaagagtaaggccaaggcaatacctgtttcacgatttaaggaagaagcccagatgtgggctcagcccaggtttggtgctgaaagattgtctaagacagagagaaactcccagaccaatatcatagcctctccacttgtcagtactgattctgtcttggttgctaaaacaaagtacctgtctgaggatagagaactggttaatacagacactgagagctttcctagaaggaaggcccattaccaagcaggattccagccttcttttaggtcaaaggaggagaccaatatggggtcctggtgctgtcctaggcctacatccaaacaagaagcctctcctaattctgatttcaaatgggtagacaaatctgtgagttccttgttctggagtggagatgaggtcactgcaaaatttcatcctgggaatagggtaaaagacagtaacagatccatgcacatggccaatcaagaggctaataccatgtctaggtcccaaactaaccaggagctctatattgcatctagttctggttctgaggatgagtctgttaagacaccctggttctgggccagagataaaaccaatacctggtctgggcccagggaagatcccaatagcaggtccaggtttaggtctaagaaagaagtctatgttgaatcaagttctggatctgagcatgaagaccatttggagtcctggtttggggctggaaaggaggccaaattcaggtccaaaatgagagctgggaaggaggccaataacagggccaggcacagggccaagcgagaagcttgcattgatttcatgcctgggtctatagatgtaattaaaaaagagtcctgtttctggcctgaagaaaatgctaataccttttcaaggcccatgatcaagaaagaggccagggccagagcaatgacaaaggaagaggccaaaaccaaggcccgagccagggccaagcaagaagccaggtcagaggaggaagccctcattgggacctggttctgggctacagacgagtccagcatggcagatgaagccagcatagagtccagtctacaagtggaggatgagtccataattgggagttggttctggactgaagaagaggccagtatggggactggggctagcagtaaatccagaccaaggactgatggggagcgtattggtgattccttatttggggctagggaaaagaccagtatgaaaactggggctgaggccacctctgaatctatactagcagctgatgatgaacaggtcattattggttcctggttctgggctggtgaagaggtcaaccaagaggctgaggaagagaccatttttgggtcgtggttctgggtcattgatgcggccagtgtggaatctggtgttggggtcagctgtgagtccaggacaaggtctgaggaagaagaggtcattggtccctggttttggtctggagaacaagttgatatagaggctggaatcggagaagaggccaggccaggagctgaagaagagacaatattcgggtcctggttttgggctgaaaaccagacctatatggattgtagggctgaaactagctgtgacaccatgcaaggggctgaggaggaggagcccattattgggtcctggttttggaccagagtagaagcttgtgtggagggtgatgtcaacagcaagtctagcctggaggacaaggaagaggccatgataccatgttttggagccaaagaagaggtcagtatgaagcatgggactggtgtcagatgcagatttatggcaggggctgaggagaccaataataagtcttgcttctgggcagaaaaagaaccctgtatgtatcctgccggtggaggaagttggaagtctaggccagaggaggaagaggacattgtcaattcgtggttctggtccagaaaatacacaaagccagaggccattatagggtcctggttatgggctacagaagagagtaatatagatgggactggagaaaaggccaagttactgactgaagaggagaccataatcaattcctggttctggaaagaagatgaagccatttcagaggctactgacagagaagagtccaggccagaagctgaggagggggacattattggttcttggttctgggctggagaagaggacagactagagccagctgctgagactagagaagaagacaggctagcagctgagaaagaaggtattgttgggtcctggtttggggccagagaagagaccattagaagagaggctgggtcttgcagcaaatccagtcctaaagctgaagaggaagaagtcattattgggtcctggttctgggaagaagaggccagtccggaggcagtggcaggagtcggctttgagtcaaagcctgggactgaggaggaagaaatcactgttgggtcctggttctggcctgaagaagaagccagtatacaggctggatctcaggcagtagaggaaatggagtcagagactgaagaggaaaccatttttgggtcctggttctgggatggaaaagaagtcagtgaagaagcaggaccatgctgtgtatccaagccagaggatgatgaagagatgattgttgagtcctggttctggtctagagacaaagccattaaggaaactggaactgtggccacctgtgagtccaagccagaaaatgaggaaggggccattgttgggtcttggtttgaggctgaagatgaggtagataacaggactgacaatggaagcaactgtgggtccaggacattagctgatgaagatgaggccatagtggggtcctggttctgggcaggagatgaggcccattttgaatcaaatcctagccccgtgttcagggccatttgcaggtccacgtgttcagttgaacaggagcctgatccttcacgcaggcctcagagttgggaggaggtcactgttcagttcaagcctggtccatggggtagggtcggcttcccatctataagcccctttagatttccgaaagaggcagcatctttattctgtgaaatgtttgggggcaaacccaggaacatggtacttagcccagaaggggaagatcaggaatctttgcttcagcctgatcagcctagtcctgagttcccatttcagtatgatccttcctacaggtcagtccaggaaattcgagagcatcttagggccaaggagagtacagagcctgagagttcatcctgtaactgcatacaatgtgagctgaaaattggttctgaagagtttgaagaactccttttattaatggaaaaaattcgggatccttttattcatgaaatatctaaaatcgcaatgggtatgagaagtgcttctcaatttacccgagatttcattcgagattcaggtgttgtctcacttattgaaaccttgcttaattatccgtcctcccgagttagaacaagttttttggaaaatatgattcgcatggccccaccttatccgaatctaaacataattcagacatacatatgtaaagtgtgtgaggaaacccttgcttatagcgtggattccccggaacagctgtctggaataaggatgattagacatctcactactactactgactatcacacactggttgccaattatatgtctgggtttctctccttattagctacaggcaatgccaaaacaaggtttcatgttttgaaaatgctactgaatttgtctgaaaatcttttcatgacaaaagaactactcagtgctgaagcagtgtcagaatttataggcctctttaacagggaagagacaaatgacaatattcaaattgttcttgcaatatttgagaatattggcaacaatatcaaaaaagaaacagtgttctctgatgatgatttcaatattgagccgcttatttctgcattccacaaagttgagaaatttgctaaggaactgcaaggcaaaacagacaatcaaaatgaccctgaaggggaccaagaaaattagtaatggttaattgctggcctcagattgtccttatgttcctgagttatgatccttgagtaatgctttgattttaatagttggttctgtgttgcaacatatatctttagtgctgacactaactttgtccaactctgtctgtaagctggagcatttttctgatgccagctgaatattagagctgaaaacacatttgttgatatttgtcttgtccacattgtgatgttcagtatttgagcttatagtgaactgagcaatcataaataagccacccttctgattgtcgttctactgtatatatatatatatttgagtgttgtttgtgtttcaataaagtcctatgttaaagttggcag

SEQ ID NO: 11305 - protein, 1395 aa, Homo sapiens; identical to SEQ ID NO: 1798

SEQ ID NO: 11306 - DNA, 5585 bp, Homo sapiens
acatcagtctcactgcatatgtctctgcatgggatgacataattggaagagactcaaagccccatttcattctctctccctagatccacctccagtggctgctctgctggtggtggggttgctgctgacaaccaccctcaacgggtctgcacccatccaggaaatctctgtcttcctcaagcttggttgtgcctgttctacactctatctgtattattgaattactgactgagactgtgtttgggaaggaggctgagtgactactggactggatattgactctaactcttgtttccaagcttatatcctcaatcacctaaagatcagagtgtgaagaaacaaacctgtgacagatctgtggttgaggtttagactgggggaggagtatagtactggactttctttgtaacttgtaccatgactggggcagagattgagtctggtgcccaggtcaagcctgaaaagaagcctggggaagaggttgtaggtggggctgagatagagaatgatgtccctctggtggtcagacccaaggttaggacccaggcccagataatgcctggggcaaggcccaagaataagtccaaggttatgcctggagcaagcaccaaagttgagacaagtgcagtgggtggggcacgccctaagagtaaggccaaggcaatacctgtttcacgatttaaggaagaagcccagatgtgggctcagcccaggtttggtgctgaaagattgtctaagacagagagaaactcccagaccaatatcatagcctctccacttgtcagtactgattctgtcttggttgctaaaacaaagtacctgtctgaggatagagaactggttaatacagacactgagagctttcctagaaggaaggcccattaccaagcaggattccagccttcttttaggtcaaaggaggagaccaatatggggtcctggtgctgtcctaggcctacatccaaacaagaagcctctcctaattctgatttcaaatgggtagacaaatctgtgagttccttgttctggagtggagatgaggtcactgcaaaatttcatcctgggaatagggtaaaagacagtaacagatccatgcacatggccaatcaagaggctaataccatgtctaggtcccaaactaaccaggagctctatattgcatctagttctggttctgaggatgagtctgttaagacaccctggttctgggccagagataaaaccaatacctggtctgggcccagggaagatcccaatagcaggtccaggtttaggtctaagaaagaagtctatgttgaatcaagttctggatctgagcatgaagaccatttggagtcctggtttggggctggaaaggaggccaaattcaggtccaaaatgagagctgggaaggaggccaataacagggccaggcacagggccaagcgagaagcttgcattgatttcatgcctgggtctatagatgtaattaaaaaagagtcctgtttctggcctgaagaaaatgctaataccttttcaaggcccatgatcaagaaagaggccagggccagagcaatgacaaaggaagaggccaaaaccaaggcccgagccagggccaagcaagaagccaggtcagaggaggaagccctcattgggacctggttctgggctacagacgagtccagcatggcagatgaagccagcatagagtccagtctacaagtggaggatgagtccataattgggagttggttctggactgaagaagaggccagtatggggactggggctagcagtaaatccagaccaaggactgatggggagcgtattggtgattccttatttggggctagggaaaagaccagtatgaaaactggggctgaggccacctctgaatctatactagcagctgatgatgaacaggtcattattggttcctggttctgggctggtgaagaggtcaaccaagaggctgaggaagagaccatttttgggtcgtggttctgggtcattgatgcggccagtgtggaatctggtgttggggtcagctgtgagtccaggacaaggtctgaggaagaagaggtcattggtccctggttttggtctggagaacaagttgatatagaggctggaatcggagaagaggccaggccaggagctgaagaagagacaatattcgggtcctggttttgggctgaaaaccagacctatatggattgtagggctgaaactagctgtgacaccatgcaaggggctgaggaggaggagcccattattgggtcctggttttggaccagagtagaagcttgtgtggagggtgatgtcaacagcaagtctagcctggaggacaaggaagaggccatgataccatgttttggagccaaagaagaggtcagtatgaagcatgggactggtgtcagatgcagatttatggcaggggctgaggagaccaataataagtcttgcttctgggcagaaaaagaaccctgtatgtatcctgccggtggaggaagttggaagtctaggccagaggaggaagaggacattgtcaattcgtggttctggtccagaaaatacacaaagccagaggccattatagggtcctggttatgggctacagaagagagtaatatagatgggactggagaaaaggccaagttactgactgaagaggagaccataatcaattcctggttctggaaagaagatgaagccatttcagaggctactgacagagaagagtccaggccagaagctgaggagggggacattattggttcttggttctgggctggagaagaggacagactagagccagctgctgagactagagaagaagacaggctagcagctgagaaagaaggtattgttgggtcctggtttggggccagagaagagaccattagaagagaggctgggtcttgcagcaaatccagtcctaaagctgaagaggaagaagtcattattgggtcctggttctgggaagaagaggccagtccggaggcagtggcaggagtcggctttgagtcaaagcctgggactgaggaggaagaaatcactgttgggtcctggttctggcctgaagaagaagccagtatacaggctggatctcaggcagtagaggaaatggagtcagagactgaagaggaaaccatttttgggtcctggttctgggatggaaaagaagtcagtgaagaagcaggaccatgctgtgtatccaagccagaggatgatgaagagatgattgttgagtcctggttctggtctagagacaaagccattaaggaaactggaactgtggccacctgtgagtccaagccagaaaatgaggaaggggccattgttgggtcttggtttgaggctgaagatgaggtagataacaggactgacaatggaagcaactgtgggtccaggacattagctgatgaagatgaggccatagtggggtcctggttctgggcaggagatgaggcccattttgaatcaaatcctagccccgtgttcagggccatttgcaggtccacgtgttcagttgaacaggagcctgatccttcacgcaggcctcagagttgggaggaggtcactgttcagttcaagcctggtccatggggtagggtcggcttcccatctataagcccctttagatttccgaaagaggcagcatctttattctgtgaaatgtttgggggcaaacccaggaacatggtacttagcccagaaggggaagatcaggaatctttgcttcagcctgatcagcctagtcctgagttcccatttcagtatgatccttcctacaggtcagtccaggaaattcgagagcatcttagggccaaggagagtacagagcctgagagttcatcctgtaactgcatacaatgtgagctgaaaattggttctgaagagtttgaagaactccttttattaatggaaaaaattcgggatccttttattcatgaaatatctaaaatcgcaatgggtatgagaagtgcttctcaatttacccgagatttcattcgagattcaggtgttgtctcacttattgaaaccttgcttaattatccgtcctcccgagttagaacaagttttttggaaaatatgattcgcatggccccaccttatccgaatctaaacataattcagacatacatatgtaaagtgtgtgaggaaacccttgcttatagcgtggattccccggaacagctgtctggaataaggatgattagacatctcactactactactgactatcacacactggttgccaattatatgtctgggtttctctccttattagctacaggcaatgccaaaacaaggtttcatgttttgaaaatgctactgaatttgtctgaaaatcttttcatgacaaaagaactactcagtgctgaagcagtgtcagaatttataggcctctttaacagggaagagacaaatgacaatattcaaattgttcttgcaatatttgagaatattggcaacaatatcaaaaaagaaacagtgttctctgatgatgatttcaatattgagccgcttatttctgcattccacaaagttgagaaatttgctaaggaactgcaaggcaaaacagacaatcaaaatgaccctgaaggggaccaagaaaattagtaatggttaattgctggcctcagattgtccttatgttcctgagttatgatccttgagtaatgctttgattttaatagttggttctgtgttgcaacatatatctttagtgctgacactaactttgtccaactctgtctgtaagctggagcatttttctgatgccagctgaatattagagctgaaaacacatttgttgatatttgtcttgtccacattgtgatgttcagtatttgagcttatagtgaactgagcaatcataaataagccacccttctgattgtcgttctactgtatatatatatatatttgagtgttgtttgtgtttcaataaagtcctatgttaaagttggcagaaatcacccttcttcttgaaattaaaatacagacccaatgataacacatgaacacacatagagataattaatatatgaataatatgttcctttcaaaagtttttttctcagctttaaacgcaaaaattaccaggggctgctatgtagggcatacttcagagaaaaagtagctacttcggttggactctgaagtttgggaaagatattggtggtgtaaaaaaaaaaaaaagcatggagttaggaaaaattttcctatgggagtgaggtatcctgtttgcctagagtgagtgagaggaatatattgagcaacatagaggatgacataagttttaaagagctgaggatttgcattttacagctcaaagtacaactgctgcttccatactacctaaagggcaaaagaataagacaggaaagcatagggatttgattgagtcaggaagacaatttaatcatgatggtaccatggtaagtgttaaggcaacatcatacagccattaaacatgatgatgtatagggttttaggaaaagccctgacatttttgatatttcatataatagagaacactggtgtcatacatgggaagtatgatcccatttgaaaaataaatgtgaataaattgacca

SEQ ID NO: 11307 - protein, 1395 aa, Homo sapiens; identical to SEQ ID NO: 1798

SEQ ID NO: 11308 - DNA, 578 bp, Homo sapiens
atgtgaccaggctctgggttgagccggcctagaggagtgttttcttacacccagaaagtacaggaaaggcagacgacaactgtgctccgcagagcgggaggtggggggaacggcggaatattaaggagctcaagaagcagagactctacctgccctaggcgttcgtgaagagaagcagctgttgctattggaggaggcctactttaaggctggccaattctgcaagaaaggcaaggaggaggagactggctcacagctctggaggacccccttctgtcagctgtggggcttgacaccacttgaacaagaaaaggagggggaaactgcaccacatcagtgaagccgagtggtcctccagagcaaaggccagccttccttccagctgtctggccaaggagcttcaggatcttctagcaagcaccccagaggcagaagactgtcatccatggtacaggactgcggcgaacaagctgactgcgcagtcacgtggggctgacggtgggtcatgtgaccaggctctgcattaggcctgccgagaggagtgttttcttgcatccagaaaagacctgagaggcgga

SEQ ID NO: 11309 - protein, 77 aa, Homo sapiens
HHLNKKRRGKLHHISEAEWSSRAKASLPSSCLAKELQDLLASTPEAEDCHPWYRTAANKLTAQSRGADGGSCDQALH

SEQ ID NO: 11310 - DNA, 3495 bp, Homo sapiens
cttacacccagaaagtacaggaaaggcagacgacaactgtgctccgcagagcgggaggtggggggaacggcggaatattaaggagctcaagaagcagagactctacctgccctaggcgttcgtgaagagaagcagctgttgctattggaggaggcctactttaaggctggccaattctgcaagaaaggcaaggaggaggagactggctcacagctctggaggacccccttctgtcagctgtggggcttgacaccacttgaacaagaaaaggagggggaaactgcaccacatcagtgaagatccacctccagtggctgctctgctggtggtggagttgctgctgacaaccaccctcaacgggtctgcacccatccaggaaatatctgtcttcctttagcttggttgtacctgttctcactctatctgtattattgaattattgactgagactgtgtttgggaaggaggctgagtgactactggactggatattgactctaactcttattcccaagcttatatccttaatcacctaaagatcagagtgtgaagaaacaaacctgtgacagatctgtggttgaggtttagactacgggaggagtatattacctgactttctttgtaacttgtaccatgactggggcagagattgagcctagtgcccaggccaagcctgaaaagaaggctggggaagaggttatcgctgggcctgagagagagaatgatgtccctctggtggtcagacccaaggttaggacccaggcaactactggggcaaggcccaaaactgagaccaagtctgtgcctgcggcaaggcccaaaactgaggcccaagcaatgtctggggcaaggcccaaaactgaggtccaagtaatgggtggtgcaagacccaaaacggaggctcaaggaatcacaggggccaggcccaaaaccgatgccagggcagtaggtggcgctcgttctaaaactgatgccaaggcaatccctggagcaaggcccaaggatgaggcccaggcatgggcccagagtgaatttgggactgaagcagtgtcacaggcagaaggagtgtcccagactaatgccgttgcttggccactggccactgctgagtctggatcagttactaaatctaagggcctgtctatggatagagaactagtcaatgtggatgctgaaacctttcctggcacccagggtcagaaaggaatccagccctggtttggaccaggggaggagactaatatggggtcttggtgctattccaggcccagggccagagaggaggcctctaatgagtctgggttctggtcagcagatgagacctctacagcgtcttctttctggactggagaagagacaagtgtcagatcatggcccagggaagagtccaataccaggtccaggcacagggctaaacatcagactaatcccaggtccaggcccagatccaagcaagaagcctatgttgattcctggtctggatctgaggatgaggccagcaacccattctccttctgggttggagaaaataccaataacttgttcaggcccagagtcagggaggaggcaaatatcaggtccaagctcaggacaaatagagaagattgttttgaatctgagtctgaagatgagttctataagcagtcctgggttttgcctggagaagaggccaatagtagattcaggcacagagacaaagaagatcctaatactgccttgaaactcagggcccagaaagatgttgacagtgatagggtcaaacaagaacccaggtttgaggaggaagtcattattgggtcctggttctgggcagaaaaagaggccagtttggagggtggagcttcagcaatctgtgaatctgagccaggaactgaggagggggccattggcggatccgcgtactgggctgaggaaaagtccagtttgggggctgtggccagagaagaggccaagccggagtctgaagaagaggccatatttgggtcctggttctgggacagagatgaggcctgctttgacctaaatccctgtcctgtgtacaaggtcagtgataggttcagagatgcagctgaggagcttaatgcatcctccaggccccaaacctgggacgaggtcactgttgaattcaaacctggtctttttcatggggttggcttccgatccacaagcccctttggaattcccgaagaggcttctgaaatgcttgaggcaaagcccaagaacctggaacttagcccagaaggagaagagcaggaatctttgcttcagcctgatcagcctagtcctgagttcacatttcagtatgatccttcctaccggtcagtccgggaaattcgagagcatcttagggccagggagagtgcagagtctgagagttggtcctgcagctgcatacaatgtgagctgaaaattggttctgaagagtttgaagaattccttttattaatggacaaaattcgggatccttttattcatgaaatatctaaaattgcaatgggtatgagaagtgcttctcaatttacccgagatttcattcgagattcaggtgttgtctcacttattgaaaccttgcttaattatccatcctctagagttaggacaagttttttggaaaatatgattcacatggctccaccttatccaaatctaaacatgattgagacattcatatgtcaagtgtgtgaggaaacccttgcacatagtgtggattcccttgagcagctgactggaataaggatgcttagacacctcactatgactattgactatcacacactgattgccaactatatgtccgggtttctctccttattaaccacagccaatgcgagaacgaagtttcacgttctgaaaatgctattgaatttgtctgaaaatcctgctgtggcaaaaaaactattcagtgccaaagctctttcaatatttgtgggtctctttaacatagaagagacaaatgataatattcaaattgttattaaaatgtttcagaatatcagtaacattataaaaagtggaaagatgtccttaattgatgatgatttcagtcttgagccgcttatttctgcatttcgtgaatttgaggagttagctaagcaactacaagcccaaatagacaaccaaaatgatcctgaggtgggacaacaaagttaatatgattaaccacctgccgctgatcagccttatgttcccaaagagccctgagtagtgctttggtgttcacagtctgtttttttgttgtaacttatattttttaatgctgatgttaactttgtcaaactcttgttttgagctggatcattttgtggatgccaaatgaatatcaaaactgaaaacacatttgttgatatttgtcttgctgtccagattgcggtatttttcagtattaagttttcaatgaactgtgtcacctaagtaagctaccctgctattcgttgtttaaatatatggttctctatttgagtctgtgttttcaataaagttctatgttaaaattggc

SEQ ID NO: 11311 - protein, 838 aa, Homo sapiens; identical to SEQ ID NO: 1800

SEQ ID NO: 11312 - DNA, 878 bp, Homo sapiens
gctgttctctccagcgcggctcttcccgacctcgcgatcctgtcccctgcccgggcccccagccgcccgctggtcccatatattacagcagcgacagaaatatggtagtggtcgccacgttagggtccgtgggggcctcctgaggcagcctggtgccaacccgcacgcccaggctggggctcatcctggccctgcccacctcggggtcggaactacggtgggcctgggatgggggcgtcaagcactttcgcgccgtatccctccgccccccttcccgacaccctcgcggcgagcggttcttgccgcatcctgcgcagcccctgcctactttggtgcagaggcgtggggggcgggacgcgtctttcccgttcggatcgcggggaaagcagtggctccaagtgagccagaggagagctgaggagaggagggggaggccgacgacctgggccctgggcctctgaaggtctggcgtattctgacaggacacagtgagcgtctgtagaggagaggcttgaaataaaggagcacgaatattgcctggatttctggagaatatgcggcgcccttcccccattttatgctgcgcagagcaaggggatgtggcgcacctagtggtgaatcctcagaattggagaagggagtaatgggaagaatatgacgtcaagagaaggagttgttatctctggaaccttgaagcagggcccaaataaaacgagaatattccaccagcaaaaccccgaatgttgaaagacagataccaataatatggggactcttatccttggcgttggcctgtctaccaagtgctcttctgccaccactcatatcctgactgtcttactttttcatgtgtttgtccataggcctactttaaggct

SEQ ID NO: 11313 - protein, 57 aa, Homo sapiens
MGASSTFAPYPSAPLPDTLAASGSCRILRSPCLLWCRGVGGGTRLSRSDRGESSGSK

SEQ ID NO: 11314 - DNA, 3757 bp, Homo sapiens
gctgttctctccagcgcggctcttcccgacctcgcgatcctgtcccctgcccgggcccccagccgcccgctggtcccatatattacagcagcgacagaaatatggtagtggtcgccacgttagggtccgtgggggcctcctgaggcagcctggtgccaacccgcacgcccaggctggggctcatcctggccctgcccacctcggggtcggaactacggtgggcctgggatgggggcgtcaagcactttcgcgccgtatccctccgccccccttcccgacaccctcgcggcgagcggttcttgccgcatcctgcgcagcccctgcctactttggtgcagaggcgtggggggcgggacgcgtctttcccgttcggatcgcggggaaagcagtggctccaagtgagccagaggagagctgaggagaggagggggaggccgacgacctgggccctgggcctctgaaggtctggcgtattctgacaggacacagtgagcgtctgtagaggagaggcttgaaataaaggagcacgaatattgcctggatttctggaggcctactttaaggctggccaattctgcaagaaaggcaaggaggagttgctgctgacaaccaccctcaacgggtctgcacccatccaggaaatatctgtcttcctttagcttggttgtacctgttctcactctatctgtattattgaattattgactgagactgtgtttgggaaggaggctgagtgactactggactggatattgactctaactcttattcccaagcttatatccttaatcacctaaagatcagagtgtgaagaaacaaacctgtgacagatctgtggttgaggtttagactacgggaggagtatattacctgactttctttgtaacttgtaccatgactggggcagagattgagcctagtgcccaggccaagcctgaaaagaaggctggggaagaggttatcgctgggcctgagagagagaatgatgtccctctggtggtcagacccaaggttaggacccaggcaactactggggcaaggcccaaaactgagaccaagtctgtgcctgcggcaaggcccaaaactgaggcccaagcaatgtctggggcaaggcccaaaactgaggtccaagtaatgggtggtgcaagacccaaaacggaggctcaaggaatcacaggggccaggcccaaaaccgatgccagggcagtaggtggcgctcgttctaaaactgatgccaaggcaatccctggagcaaggcccaaggatgaggcccaggcatgggcccagagtgaatttgggactgaagcagtgtcacaggcagaaggagtgtcccagactaatgccgttgcttggccactggccactgctgagtctggatcagttactaaatctaagggcctgtctatggatagagaactagtcaatgtggatgctgaaacctttcctggcacccagggtcagaaaggaatccagccctggtttggaccaggggaggagactaatatggggtcttggtgctattccaggcccagggccagagaggaggcctctaatgagtctgggttctggtcagcagatgagacctctacagcgtcttctttctggactggagaagagacaagtgtcagatcatggcccagggaagagtccaataccaggtccaggcacagggctaaacatcagactaatcccaggtccaggcccagatccaagcaagaagcctatgttgattcctggtctggatctgaggatgaggccagcaacccattctccttctgggttggagaaaataccaataacttgttcaggcccagagtcagggaggaggcaaatatcaggtccaagctcaggacaaatagagaagattgttttgaatctgagtctgaagatgagttctataagcagtcctgggttttgcctggagaagaggccaatagtagattcaggcacagagacaaagaagatcctaatactgccttgaaactcagggcccagaaagatgttgacagtgatagggtcaaacaagaacccaggtttgaggaggaagtcattattgggtcctggttctgggcagaaaaagaggccagtttggagggtggagcttcagcaatctgtgaatctgagccaggaactgaggagggggccattggcggatccgcgtactgggctgaggaaaagtccagtttgggggctgtggccagagaagaggccaagccggagtctgaagaagaggccatatttgggtcctggttctgggacagagatgaggcctgctttgacctaaatccctgtcctgtgtacaaggtcagtgataggttcagagatgcagctgaggagcttaatgcatcctccaggccccaaacctgggacgaggtcactgttgaattcaaacctggtctttttcatggggttggcttccgatccacaagcccctttggaattcccgaagaggcttctgaaatgcttgaggcaaagcccaagaacctggaacttagcccagaaggagaagagcaggaatctttgcttcagcctgatcagcctagtcctgagttcacatttcagtatgatccttcctaccggtcagtccgggaaattcgagagcatcttagggccagggagagtgcagagtctgagagttggtcctgcagctgcatacaatgtgagctgaaaattggttctgaagagtttgaagaattccttttattaatggacaaaattcgggatccttttattcatgaaatatctaaaattgcaatgggtatgagaagtgcttctcaatttacccgagatttcattcgagattcaggtgttgtctcacttattgaaaccttgcttaattatccatcctctagagttaggacaagttttttggaaaatatgattcacatggctccaccttatccaaatctaaacatgattgagacattcatatgtcaagtgtgtgaggaaacccttgcacatagtgtggattcccttgagcagctgactggaataaggatgcttagacacctcactatgactattgactatcacacactgattgccaactatatgtccgggtttctctccttattaaccacagccaatgcgagaacgaagtttcacgttctgaaaatgctattgaatttgtctgaaaatcctgctgtggcaaaaaaactattcagtgccaaagctctttcaatatttgtgggtctctttaacatagaagagacaaatgataatattcaaattgttattaaaatgtttcagaatatcagtaacattataaaaagtggaaagatgtccttaattgatgatgatttcagtcttgagccgcttatttctgcatttcgtgaatttgaggagttagctaagcaactacaagcccaaatagacaaccaaaatgatcctgaggtgggacaacaaagttaatatgattaaccacctgccgctgatcagccttatgttcccaaagagccctgagtagtgctttggtgttcacagtctgtttttttgttgtaacttatattttttaatgctgatgttaactttgtcaaactcttgttttgagctggatcattttgtggatgccaaatgaatatcaaaactgaaaacacatttgttgatatttgtcttgctgtccagattgcggtatttttcagtattaagttttcaatgaactgtgtcacctaagtaagctaccctgctattcgttgtttaaatatatggttctctatttgagtctgtgttttcaataaagttctatgttaaaattggc

SEQ ID NO: 11315 - protein, 838 aa, Homo sapiens; identical to SEQ ID NO: 1800

SEQ ID NO: 11316 - DNA, 3893 bp, Homo sapiens
gctgttctctccagcgcggctcttcccgacctcgcgatcctgtcccctgcccgggcccccagccgcccgctggtcccatatattacagcagcgacagaaatatggtagtggtcgccacgttagggtccgtgggggcctcctgaggcagcctggtgccaacccgcacgcccaggctggggctcatcctggccctgcccacctcggggtcggaactacggtgggcctgggatgggggcgtcaagcactttcgcgccgtatccctccgccccccttcccgacaccctcgcggcgagcggttcttgccgcatcctgcgcagcccctgcctactttggtgcagaggcgtggggggcgggacgcgtctttcccgttcggatcgcggggaaagcagtggctccaagtgagccagaggagagctgaggagaggagggggaggccgacgacctgggccctgggcctctgaaggtctggcgtattctgacaggacacagtgagcgtctgtagaggagaggcttgaaataaaggagcacgaatattgcctggatttctggaggcctactttaaggctggccaattctgcaagaaaggcaaggaggaggagactggctcacagctctggaggacccccttctgtcagctgtggggcttgacaccacttgaacaagaaaaggagggggaaactgcaccacatcagtgaagatccacctccagtggctgctctgctggtggtggagttgctgctgacaaccaccctcaacgggtctgcacccatccaggaaatatctgtcttcctttagcttggttgtacctgttctcactctatctgtattattgaattattgactgagactgtgtttgggaaggaggctgagtgactactggactggatattgactctaactcttattcccaagcttatatccttaatcacctaaagatcagagtgtgaagaaacaaacctgtgacagatctgtggttgaggtttagactacgggaggagtatattacctgactttctttgtaacttgtaccatgactggggcagagattgagcctagtgcccaggccaagcctgaaaagaaggctggggaagaggttatcgctgggcctgagagagagaatgatgtccctctggtggtcagacccaaggttaggacccaggcaactactggggcaaggcccaaaactgagaccaagtctgtgcctgcggcaaggcccaaaactgaggcccaagcaatgtctggggcaaggcccaaaactgaggtccaagtaatgggtggtgcaagacccaaaacggaggctcaaggaatcacaggggccaggcccaaaaccgatgccagggcagtaggtggcgctcgttctaaaactgatgccaaggcaatccctggagcaaggcccaaggatgaggcccaggcatgggcccagagtgaatttgggactgaagcagtgtcacaggcagaaggagtgtcccagactaatgccgttgcttggccactggccactgctgagtctggatcagttactaaatctaagggcctgtctatggatagagaactagtcaatgtggatgctgaaacctttcctggcacccagggtcagaaaggaatccagccctggtttggaccaggggaggagactaatatggggtcttggtgctattccaggcccagggccagagaggaggcctctaatgagtctgggttctggtcagcagatgagacctctacagcgtcttctttctggactggagaagagacaagtgtcagatcatggcccagggaagagtccaataccaggtccaggcacagggctaaacatcagactaatcccaggtccaggcccagatccaagcaagaagcctatgttgattcctggtctggatctgaggatgaggccagcaacccattctccttctgggttggagaaaataccaataacttgttcaggcccagagtcagggaggaggcaaatatcaggtccaagctcaggacaaatagagaagattgttttgaatctgagtctgaagatgagttctataagcagtcctgggttttgcctggagaagaggccaatagtagattcaggcacagagacaaagaagatcctaatactgccttgaaactcagggcccagaaagatgttgacagtgatagggtcaaacaagaacccaggtttgaggaggaagtcattattgggtcctggttctgggcagaaaaagaggccagtttggagggtggagcttcagcaatctgtgaatctgagccaggaactgaggagggggccattggcggatccgcgtactgggctgaggaaaagtccagtttgggggctgtggccagagaagaggccaagccggagtctgaagaagaggccatatttgggtcctggttctgggacagagatgaggcctgctttgacctaaatccctgtcctgtgtacaaggtcagtgataggttcagagatgcagctgaggagcttaatgcatcctccaggccccaaacctgggacgaggtcactgttgaattcaaacctggtctttttcatggggttggcttccgatccacaagcccctttggaattcccgaagaggcttctgaaatgcttgaggcaaagcccaagaacctggaacttagcccagaaggagaagagcaggaatctttgcttcagcctgatcagcctagtcctgagttcacatttcagtatgatccttcctaccggtcagtccgggaaattcgagagcatcttagggccagggagagtgcagagtctgagagttggtcctgcagctgcatacaatgtgagctgaaaattggttctgaagagtttgaagaattccttttattaatggacaaaattcgggatccttttattcatgaaatatctaaaattgcaatgggtatgagaagtgcttctcaatttacccgagatttcattcgagattcaggtgttgtctcacttattgaaaccttgcttaattatccatcctctagagttaggacaagttttttggaaaatatgattcacatggctccaccttatccaaatctaaacatgattgagacattcatatgtcaagtgtgtgaggaaacccttgcacatagtgtggattcccttgagcagctgactggaataaggatgcttagacacctcactatgactattgactatcacacactgattgccaactatatgtccgggtttctctccttattaaccacagccaatgcgagaacgaagtttcacgttctgaaaatgctattgaatttgtctgaaaatcctgctgtggcaaaaaaactattcagtgccaaagctctttcaatatttgtgggtctctttaacatagaagagacaaatgataatattcaaattgttattaaaatgtttcagaatatcagtaacattataaaaagtggaaagatgtccttaattgatgatgatttcagtcttgagccgcttatttctgcatttcgtgaatttgaggagttagctaagcaactacaagcccaaatagacaaccaaaatgatcctgaggtgggacaacaaagttaatatgattaaccacctgccgctgatcagccttatgttcccaaagagccctgagtagtgctttggtgttcacagtctgtttttttgttgtaacttatattttttaatgctgatgttaactttgtcaaactcttgttttgagctggatcattttgtggatgccaaatgaatatcaaaactgaaaacacatttgttgatatttgtcttgctgtccagattgcggtatttttcagtattaagttttcaatgaactgtgtcacctaagtaagctaccctgctattcgttgtttaaatatatggttctctatttgagtctgtgttttcaataaagttctatgttaaaattggc

SEQ ID NO: 11317 - protein, 838 aa, Homo sapiens; identical to SEQ ID NO: 1800

SEQ ID NO: 11318 - DNA, 4021 bp, Homo sapiens
gctgttctctccagcgcggctcttcccgacctcgcgatcctgtcccctgcccgggcccccagccgcccgctggtcccatatattacagcagcgacagaaatatggtagtggtcgccacgttagggtccgtgggggcctcctgaggcagcctggtgccaacccgcacgcccaggctggggctcatcctggccctgcccacctcggggtcggaactacggtgggcctgggatgggggcgtcaagcactttcgcgccgtatccctccgccccccttcccgacaccctcgcggcgagcggttcttgccgcatcctgcgcagcccctgcctactttggtgcagaggcgtggggggcgggacgcgtctttcccgttcggatcgcggggaaagcagtggctccaagtgagccagaggagagctgaggagaggagggggaggccgacgacctgggccctgggcctctgaaggtctggcgtattctgacaggacacagtgagcgtctgtagaggagaggcttgaaataaaggagcacgaatattgcctggatttctggaggcctactttaaggctggccaattctgcaagaaaggcaaggaggaggagactggctcacagctctggaggacccccttctgtcagctgtggggcttgacaccacttgaacaagaaaaggagggggaaactgcaccacatcagtgaaggaggcagccggtccagagagactttctcaaagcccagctgtcccacctagcattcaacatcagtcgcactgcatacgtctcatacaattggaagagactcaaagcctcatttcattctctctccctagatccacctccagtggctgctctgctggtggtggagttgctgctgacaaccaccctcaacgggtctgcacccatccaggaaatatctgtcttcctttagcttggttgtacctgttctcactctatctgtattattgaattattgactgagactgtgtttgggaaggaggctgagtgactactggactggatattgactctaactcttattcccaagcttatatccttaatcacctaaagatcagagtgtgaagaaacaaacctgtgacagatctgtggttgaggtttagactacgggaggagtatattacctgactttctttgtaacttgtaccatgactggggcagagattgagcctagtgcccaggccaagcctgaaaagaaggctggggaagaggttatcgctgggcctgagagagagaatgatgtccctctggtggtcagacccaaggttaggacccaggcaactactggggcaaggcccaaaactgagaccaagtctgtgcctgcggcaaggcccaaaactgaggcccaagcaatgtctggggcaaggcccaaaactgaggtccaagtaatgggtggtgcaagacccaaaacggaggctcaaggaatcacaggggccaggcccaaaaccgatgccagggcagtaggtggcgctcgttctaaaactgatgccaaggcaatccctggagcaaggcccaaggatgaggcccaggcatgggcccagagtgaatttgggactgaagcagtgtcacaggcagaaggagtgtcccagactaatgccgttgcttggccactggccactgctgagtctggatcagttactaaatctaagggcctgtctatggatagagaactagtcaatgtggatgctgaaacctttcctggcacccagggtcagaaaggaatccagccctggtttggaccaggggaggagactaatatggggtcttggtgctattccaggcccagggccagagaggaggcctctaatgagtctgggttctggtcagcagatgagacctctacagcgtcttctttctggactggagaagagacaagtgtcagatcatggcccagggaagagtccaataccaggtccaggcacagggctaaacatcagactaatcccaggtccaggcccagatccaagcaagaagcctatgttgattcctggtctggatctgaggatgaggccagcaacccattctccttctgggttggagaaaataccaataacttgttcaggcccagagtcagggaggaggcaaatatcaggtccaagctcaggacaaatagagaagattgttttgaatctgagtctgaagatgagttctataagcagtcctgggttttgcctggagaagaggccaatagtagattcaggcacagagacaaagaagatcctaatactgccttgaaactcagggcccagaaagatgttgacagtgatagggtcaaacaagaacccaggtttgaggaggaagtcattattgggtcctggttctgggcagaaaaagaggccagtttggagggtggagcttcagcaatctgtgaatctgagccaggaactgaggagggggccattggcggatccgcgtactgggctgaggaaaagtccagtttgggggctgtggccagagaagaggccaagccggagtctgaagaagaggccatatttgggtcctggttctgggacagagatgaggcctgctttgacctaaatccctgtcctgtgtacaaggtcagtgataggttcagagatgcagctgaggagcttaatgcatcctccaggccccaaacctgggacgaggtcactgttgaattcaaacctggtctttttcatggggttggcttccgatccacaagcccctttggaattcccgaagaggcttctgaaatgcttgaggcaaagcccaagaacctggaacttagcccagaaggagaagagcaggaatctttgcttcagcctgatcagcctagtcctgagttcacatttcagtatgatccttcctaccggtcagtccgggaaattcgagagcatcttagggccagggagagtgcagagtctgagagttggtcctgcagctgcatacaatgtgagctgaaaattggttctgaagagtttgaagaattccttttattaatggacaaaattcgggatccttttattcatgaaatatctaaaattgcaatgggtatgagaagtgcttctcaatttacccgagatttcattcgagattcaggtgttgtctcacttattgaaaccttgcttaattatccatcctctagagttaggacaagttttttggaaaatatgattcacatggctccaccttatccaaatctaaacatgattgagacattcatatgtcaagtgtgtgaggaaacccttgcacatagtgtggattcccttgagcagctgactggaataaggatgcttagacacctcactatgactattgactatcacacactgattgccaactatatgtccgggtttctctccttattaaccacagccaatgcgagaacgaagtttcacgttctgaaaatgctattgaatttgtctgaaaatcctgctgtggcaaaaaaactattcagtgccaaagctctttcaatatttgtgggtctctttaacatagaagagacaaatgataatattcaaattgttattaaaatgtttcagaatatcagtaacattataaaaagtggaaagatgtccttaattgatgatgatttcagtcttgagccgcttatttctgcatttcgtgaatttgaggagttagctaagcaactacaagcccaaatagacaaccaaaatgatcctgaggtgggacaacaaagttaatatgattaaccacctgccgctgatcagccttatgttcccaaagagccctgagtagtgctttggtgttcacagtctgtttttttgttgtaacttatattttttaatgctgatgttaactttgtcaaactcttgttttgagctggatcattttgtggatgccaaatgaatatcaaaactgaaaacacatttgttgatatttgtcttgctgtccagattgcggtatttttcagtattaagttttcaatgaactgtgtcacctaagtaagctaccctgctattcgttgtttaaatatatggttctctatttgagtctgtgttttcaataaagttctatgttaaaattggc

SEQ ID NO: 11319 - protein, 838 aa, Homo sapiens; identical to SEQ ID NO: 1800

SEQ ID NO: 11320 - DNA, 861 bp, Homo sapiens
gctgttctctccagcgcggctcttcccgacctcgcgatcctgtcccctgcccgggcccccagccgcccgctggtcccatatattacagcagcgacagaaatatggtagtggtcgccacgttagggtccgtgggggcctcctgaggcagcctggtgccaacccgcacgcccaggctggggctcatcctggccctgcccacctcggggtcggaactacggtgggcctgggatgggggcgtcaagcactttcgcgccgtatccctccgccccccttcccgacaccctcgcggcgagcggttcttgccgcatcctgcgcagcccctgcctactttggtgcagaggcgtggggggcgggacgcgtctttcccgttcggatcgcggggaaagcagtggctccaagtgagccagaggagagctgaggagaggagggggaggccgacgacctgggccctgggcctctgaaggtctggcgtattctgacaggacacagtgagcgtctgtagaggagaggcttgaaataaaggagcacgaatattgcctggatttctggaggcctactttaaggctggccaattctgcaagaaaggcaaggaggaggagactggctcacagctctggaggacccccttctgtcagctgtggggcttgacaccacttgaacaagaaaaggagggggaaactgcaccacatcagtgaagccgagtggtcctccagagcaaaggccagccttccttccagctgtctggccaaggagcttcaggatcttctagcaagcaccccagaggcagaagactgtcatccatggtacaggactgcggcgaacaagctgactgcgcagtcacgtggggctgacggtgggtca

SEQ ID NO: 11321 - protein, 57 aa, Homo sapiens; identical to SEQ ID NO: 11313

SEQ ID NO: 11322 - DNA, 3719 bp, Homo sapiens
agcagcgacagaaatatggtagtggtcgccacgttagggtccgtgggggcctcctgaggcagcctggtgccaacccgcacgcccaggctggggctcatcctggccctgcccacctcggggtcggaactacggtgggcctgggatgggggcgtcaagcactttcgcgccgtatccctccgccccccttcccgacaccctcgcggcgagcggttcttgccgcatcctgcgcagcccctgcctactttggtgcagaggcgtggggggcgggacgcgtctttcccgttcggatcgcggggaaagcagtggctccaagtgagccagaggagagctgaggagaggagggggaggccgacgacctgggccctgggcctctgaaggcctactttaaggctggccaattctgcaagaaaggcaaggaggaggagactggctcacagctctggaggacccccttctgtcagctgtggggcttgacaccacttgaacaagaaaaggagggggaaactgcaccacatcagtgaagatccacctccagtggctgctctgctggtggtggagttgctgctgacaaccaccctcaacgggtctgcacccatccaggaaatatctgtcttcctttagcttggttgtacctgttctcactctatctgtattattgaattattgactgagactgtgtttgggaaggaggctgagtgactactggactggatattgactctaactcttattcccaagcttatatccttaatcacctaaagatcagagtgtgaagaaacaaacctgtgacagatctgtggttgaggtttagactacgggaggagtatattacctgactttctttgtaacttgtaccatgactggggcagagattgagcctagtgcccaggccaagcctgaaaagaaggctggggaagaggttatcgctgggcctgagagagagaatgatgtccctctggtggtcagacccaaggttaggacccaggcaactactggggcaaggcccaaaactgagaccaagtctgtgcctgcggcaaggcccaaaactgaggcccaagcaatgtctggggcaaggcccaaaactgaggtccaagtaatgggtggtgcaagacccaaaacggaggctcaaggaatcacaggggccaggcccaaaaccgatgccagggcagtaggtggcgctcgttctaaaactgatgccaaggcaatccctggagcaaggcccaaggatgaggcccaggcatgggcccagagtgaatttgggactgaagcagtgtcacaggcagaaggagtgtcccagactaatgccgttgcttggccactggccactgctgagtctggatcagttactaaatctaagggcctgtctatggatagagaactagtcaatgtggatgctgaaacctttcctggcacccagggtcagaaaggaatccagccctggtttggaccaggggaggagactaatatggggtcttggtgctattccaggcccagggccagagaggaggcctctaatgagtctgggttctggtcagcagatgagacctctacagcgtcttctttctggactggagaagagacaagtgtcagatcatggcccagggaagagtccaataccaggtccaggcacagggctaaacatcagactaatcccaggtccaggcccagatccaagcaagaagcctatgttgattcctggtctggatctgaggatgaggccagcaacccattctccttctgggttggagaaaataccaataacttgttcaggcccagagtcagggaggaggcaaatatcaggtccaagctcaggacaaatagagaagattgttttgaatctgagtctgaagatgagttctataagcagtcctgggttttgcctggagaagaggccaatagtagattcaggcacagagacaaagaagatcctaatactgccttgaaactcagggcccagaaagatgttgacagtgatagggtcaaacaagaacccaggtttgaggaggaagtcattattgggtcctggttctgggcagaaaaagaggccagtttggagggtggagcttcagcaatctgtgaatctgagccaggaactgaggagggggccattggcggatccgcgtactgggctgaggaaaagtccagtttgggggctgtggccagagaagaggccaagccggagtctgaagaagaggccatatttgggtcctggttctgggacagagatgaggcctgctttgacctaaatccctgtcctgtgtacaaggtcagtgataggttcagagatgcagctgaggagcttaatgcatcctccaggccccaaacctgggacgaggtcactgttgaattcaaacctggtctttttcatggggttggcttccgatccacaagcccctttggaattcccgaagaggcttctgaaatgcttgaggcaaagcccaagaacctggaacttagcccagaaggagaagagcaggaatctttgcttcagcctgatcagcctagtcctgagttcacatttcagtatgatccttcctaccggtcagtccgggaaattcgagagcatcttagggccagggagagtgcagagtctgagagttggtcctgcagctgcatacaatgtgagctgaaaattggttctgaagagtttgaagaattccttttattaatggacaaaattcgggatccttttattcatgaaatatctaaaattgcaatgggtatgagaagtgcttctcaatttacccgagatttcattcgagattcaggtgttgtctcacttattgaaaccttgcttaattatccatcctctagagttaggacaagttttttggaaaatatgattcacatggctccaccttatccaaatctaaacatgattgagacattcatatgtcaagtgtgtgaggaaacccttgcacatagtgtggattcccttgagcagctgactggaataaggatgcttagacacctcactatgactattgactatcacacactgattgccaactatatgtccgggtttctctccttattaaccacagccaatgcgagaacgaagtttcacgttctgaaaatgctattgaatttgtctgaaaatcctgctgtggcaaaaaaactattcagtgccaaagctctttcaatatttgtgggtctctttaacatagaagagacaaatgataatattcaaattgttattaaaatgtttcagaatatcagtaacattataaaaagtggaaagatgtccttaattgatgatgatttcagtcttgagccgcttatttctgcatttcgtgaatttgaggagttagctaagcaactacaagcccaaatagacaaccaaaatgatcctgaggtgggacaacaaagttaatatgattaaccacctgccgctgatcagccttatgttcccaaagagccctgagtagtgctttggtgttcacagtctgtttttttgttgtaacttatattttttaatgctgatgttaactttgtcaaactcttgttttgagctggatcattttgtggatgccaaatgaatatcaaaactgaaaacacatttgttgatatttgtcttgctgtccagattgcggtatttttcagtattaagttttcaatgaactgtgtcacctaagtaagctaccctgctattcgttgtttaaatatatggttctctatttgagtctgtgttttcaataaagttctatgttaaaattggc

SEQ ID NO: 11323 - protein, 838 aa, Homo sapiens; identical to SEQ ID NO: 1800

SEQ ID NO: 11324 - DNA, 3678 bp, Homo sapiens
gtatccctccgccccccttcccgacaccctcgcggcgagcggttcttgccgcatcctgcgcagcccctgcctactttggtgcagaggcgtggggggcgggacgcgtctttcccgttcggatcgcggggaaagcagtggctccaagtgagccagaggagagctgaggagaggagggggaggccgacgacctgggccctgggcctctgaaggctccaggttgatgtcaaagtcttgtgtctgtgcggtaggtctggcgtattctgacaggacacagtgagcgtctgtagaggagaggcttgaaataaaggagcacgaatattgcctggatttctggaggcctactttaaggctggccaattctgcaagaaaggcaaggaggaggagactggctcacagctctggaggacccccttctgtcagctgtggggcttgacaccacttgaacaagaaaaggagggggaaactgcaccacatcagtgaagatccacctccagtggctgctctgctggtggtggagttgctgctgacaaccaccctcaacgggtctgcacccatccaggaaatatctgtcttcctttagcttggttgtacctgttctcactctatctgtattattgaattattgactgagactgtgtttgggaaggaggctgagtgactactggactggatattgactctaactcttattcccaagcttatatccttaatcacctaaagatcagagtgtgaagaaacaaacctgtgacagatctgtggttgaggtttagactacgggaggagtatattacctgactttctttgtaacttgtaccatgactggggcagagattgagcctagtgcccaggccaagcctgaaaagaaggctggggaagaggttatcgctgggcctgagagagagaatgatgtccctctggtggtcagacccaaggttaggacccaggcaactactggggcaaggcccaaaactgagaccaagtctgtgcctgcggcaaggcccaaaactgaggcccaagcaatgtctggggcaaggcccaaaactgaggtccaagtaatgggtggtgcaagacccaaaacggaggctcaaggaatcacaggggccaggcccaaaaccgatgccagggcagtaggtggcgctcgttctaaaactgatgccaaggcaatccctggagcaaggcccaaggatgaggcccaggcatgggcccagagtgaatttgggactgaagcagtgtcacaggcagaaggagtgtcccagactaatgccgttgcttggccactggccactgctgagtctggatcagttactaaatctaagggcctgtctatggatagagaactagtcaatgtggatgctgaaacctttcctggcacccagggtcagaaaggaatccagccctggtttggaccaggggaggagactaatatggggtcttggtgctattccaggcccagggccagagaggaggcctctaatgagtctgggttctggtcagcagatgagacctctacagcgtcttctttctggactggagaagagacaagtgtcagatcatggcccagggaagagtccaataccaggtccaggcacagggctaaacatcagactaatcccaggtccaggcccagatccaagcaagaagcctatgttgattcctggtctggatctgaggatgaggccagcaacccattctccttctgggttggagaaaataccaataacttgttcaggcccagagtcagggaggaggcaaatatcaggtccaagctcaggacaaatagagaagattgttttgaatctgagtctgaagatgagttctataagcagtcctgggttttgcctggagaagaggccaatagtagattcaggcacagagacaaagaagatcctaatactgccttgaaactcagggcccagaaagatgttgacagtgatagggtcaaacaagaacccaggtttgaggaggaagtcattattgggtcctggttctgggcagaaaaagaggccagtttggagggtggagcttcagcaatctgtgaatctgagccaggaactgaggagggggccattggcggatccgcgtactgggctgaggaaaagtccagtttgggggctgtggccagagaagaggccaagccggagtctgaagaagaggccatatttgggtcctggttctgggacagagatgaggcctgctttgacctaaatccctgtcctgtgtacaaggtcagtgataggttcagagatgcagctgaggagcttaatgcatcctccaggccccaaacctgggacgaggtcactgttgaattcaaacctggtctttttcatggggttggcttccgatccacaagcccctttggaattcccgaagaggcttctgaaatgcttgaggcaaagcccaagaacctggaacttagcccagaaggagaagagcaggaatctttgcttcagcctgatcagcctagtcctgagttcacatttcagtatgatccttcctaccggtcagtccgggaaattcgagagcatcttagggccagggagagtgcagagtctgagagttggtcctgcagctgcatacaatgtgagctgaaaattggttctgaagagtttgaagaattccttttattaatggacaaaattcgggatccttttattcatgaaatatctaaaattgcaatgggtatgagaagtgcttctcaatttacccgagatttcattcgagattcaggtgttgtctcacttattgaaaccttgcttaattatccatcctctagagttaggacaagttttttggaaaatatgattcacatggctccaccttatccaaatctaaacatgattgagacattcatatgtcaagtgtgtgaggaaacccttgcacatagtgtggattcccttgagcagctgactggaataaggatgcttagacacctcactatgactattgactatcacacactgattgccaactatatgtccgggtttctctccttattaaccacagccaatgcgagaacgaagtttcacgttctgaaaatgctattgaatttgtctgaaaatcctgctgtggcaaaaaaactattcagtgccaaagctctttcaatatttgtgggtctctttaacatagaagagacaaatgataatattcaaattgttattaaaatgtttcagaatatcagtaacattataaaaagtggaaagatgtccttaattgatgatgatttcagtcttgagccgcttatttctgcatttcgtgaatttgaggagttagctaagcaactacaagcccaaatagacaaccaaaatgatcctgaggtgggacaacaaagttaatatgattaaccacctgccgctgatcagccttatgttcccaaagagccctgagtagtgctttggtgttcacagtctgtttttttgttgtaacttatattttttaatgctgatgttaactttgtcaaactcttgttttgagctggatcattttgtggatgccaaatgaatatcaaaactgaaaacacatttgttgatatttgtcttgctgtccagattgcggtatttttcagtattaagttttcaatgaactgtgtcacctaagtaagctaccctgctattcgttgtttaaatatatggttctctatttgagtctgtgttttcaataaagttctatgttaaaattggc

SEQ ID NO: 11325 - protein, 838 aa, Homo sapiens; identical to SEQ ID NO: 1800

SEQ ID NO: 11326 - DNA, 4197 bp, Homo sapiens
cccgacaccctcgcggcgagcggttcttgccgcatcctgcgcagcccctgcctactttggtgcagaggcgtggggggcgggacgcgtctttcccgttcggatcgcggggaaagcagtggctccaagtgagccagaggagagctgaggagaggagggggaggccgacgacctgggccctgggcctctgaaggcaagtgcgggtgcatgaggtgggggtccgggttgcgggggtggtctggcagggtggaccagcaggcagcctgccccgcggaccctgacagcctggcaacgaggagacgatccggtcggagccaggcgcttgagagaggtgcgcagtgcccgagacccctggcgatggggaggcggtgaccggagcgggcctggccaagggctgaggggctggctcgggaggcaccgccagatcgtttggaggagaaccgcgctgaccgcttcccagccagctttgcaggcgcccgcgccccgccctcgacggtgtctgtgcccggagagggctgtgggggaggctcctgcgggagaaatggcggagcgggagccgctgtgggggcgcccgggaaggccgttggggggcgcccggcgaggccggcgggggtcggcgtcccggctctgtacccagtccgccggaggtgagccgcgtttgctactccgggtcccgattcccgaaaggggcctgtggggccccatgtcctcggtgccttcccttcccacaggctccaggttgatgtcaaagtcttgtgtctgtgcggtaggtctggcgtattctgacaggacacagtgagcgtctgtagaggagaggcttgaaataaaggagcacgaatattgcctggatttctggaggcctactttaaggctggccaattctgcaagaaaggcaaggaggaggagactggctcacagctctggaggacccccttctgtcagctgtggggcttgacaccacttgaacaagaaaaggagggggaaactgcaccacatcagtgaagatccacctccagtggctgctctgctggtggtggagttgctgctgacaaccaccctcaacgggtctgcacccatccaggaaatatctgtcttcctttagcttggttgtacctgttctcactctatctgtattattgaattattgactgagactgtgtttgggaaggaggctgagtgactactggactggatattgactctaactcttattcccaagcttatatccttaatcacctaaagatcagagtgtgaagaaacaaacctgtgacagatctgtggttgaggtttagactacgggaggagtatattacctgactttctttgtaacttgtaccatgactggggcagagattgagcctagtgcccaggccaagcctgaaaagaaggctggggaagaggttatcgctgggcctgagagagagaatgatgtccctctggtggtcagacccaaggttaggacccaggcaactactggggcaaggcccaaaactgagaccaagtctgtgcctgcggcaaggcccaaaactgaggcccaagcaatgtctggggcaaggcccaaaactgaggtccaagtaatgggtggtgcaagacccaaaacggaggctcaaggaatcacaggggccaggcccaaaaccgatgccagggcagtaggtggcgctcgttctaaaactgatgccaaggcaatccctggagcaaggcccaaggatgaggcccaggcatgggcccagagtgaatttgggactgaagcagtgtcacaggcagaaggagtgtcccagactaatgccgttgcttggccactggccactgctgagtctggatcagttactaaatctaagggcctgtctatggatagagaactagtcaatgtggatgctgaaacctttcctggcacccagggtcagaaaggaatccagccctggtttggaccaggggaggagactaatatggggtcttggtgctattccaggcccagggccagagaggaggcctctaatgagtctgggttctggtcagcagatgagacctctacagcgtcttctttctggactggagaagagacaagtgtcagatcatggcccagggaagagtccaataccaggtccaggcacagggctaaacatcagactaatcccaggtccaggcccagatccaagcaagaagcctatgttgattcctggtctggatctgaggatgaggccagcaacccattctccttctgggttggagaaaataccaataacttgttcaggcccagagtcagggaggaggcaaatatcaggtccaagctcaggacaaatagagaagattgttttgaatctgagtctgaagatgagttctataagcagtcctgggttttgcctggagaagaggccaatagtagattcaggcacagagacaaagaagatcctaatactgccttgaaactcagggcccagaaagatgttgacagtgatagggtcaaacaagaacccaggtttgaggaggaagtcattattgggtcctggttctgggcagaaaaagaggccagtttggagggtggagcttcagcaatctgtgaatctgagccaggaactgaggagggggccattggcggatccgcgtactgggctgaggaaaagtccagtttgggggctgtggccagagaagaggccaagccggagtctgaagaagaggccatatttgggtcctggttctgggacagagatgaggcctgctttgacctaaatccctgtcctgtgtacaaggtcagtgataggttcagagatgcagctgaggagcttaatgcatcctccaggccccaaacctgggacgaggtcactgttgaattcaaacctggtctttttcatggggttggcttccgatccacaagcccctttggaattcccgaagaggcttctgaaatgcttgaggcaaagcccaagaacctggaacttagcccagaaggagaagagcaggaatctttgcttcagcctgatcagcctagtcctgagttcacatttcagtatgatccttcctaccggtcagtccgggaaattcgagagcatcttagggccagggagagtgcagagtctgagagttggtcctgcagctgcatacaatgtgagctgaaaattggttctgaagagtttgaagaattccttttattaatggacaaaattcgggatccttttattcatgaaatatctaaaattgcaatgggtatgagaagtgcttctcaatttacccgagatttcattcgagattcaggtgttgtctcacttattgaaaccttgcttaattatccatcctctagagttaggacaagttttttggaaaatatgattcacatggctccaccttatccaaatctaaacatgattgagacattcatatgtcaagtgtgtgaggaaacccttgcacatagtgtggattcccttgagcagctgactggaataaggatgcttagacacctcactatgactattgactatcacacactgattgccaactatatgtccgggtttctctccttattaaccacagccaatgcgagaacgaagtttcacgttctgaaaatgctattgaatttgtctgaaaatcctgctgtggcaaaaaaactattcagtgccaaagctctttcaatatttgtgggtctctttaacatagaagagacaaatgataatattcaaattgttattaaaatgtttcagaatatcagtaacattataaaaagtggaaagatgtccttaattgatgatgatttcagtcttgagccgcttatttctgcatttcgtgaatttgaggagttagctaagcaactacaagcccaaatagacaaccaaaatgatcctgaggtgggacaacaaagttaatatgattaaccacctgccgctgatcagccttatgttcccaaagagccctgagtagtgctttggtgttcacagtctgtttttttgttgtaacttatattttttaatgctgatgttaactttgtcaaactcttgttttgagctggatcattttgtggatgccaaatgaatatcaaaactgaaaacacatttgttgatatttgtcttgctgtccagattgcggtatttttcagtattaagttttcaatgaactgtgtcacctaagtaagctaccctgctattcgttgtttaaatatatggttctctatttgagtctgtgttttcaataaagttctatgttaaaattggc

SEQ ID NO: 11327 - protein, 838 aa, Homo sapiens; identical to SEQ ID NO: 1800

SEQ ID NO: 11328 - DNA, 4073 bp, Homo sapiens
ccgacaccctcgcggcgagcggttcttgccgcatcctgcgcagcccctgcctactttggtgcagaggcgtggggggcgggacgcgtctttcccgttcggatcgcggggaaagcagtggctccaagtgagccagaggagagctgaggagaggagggggaggccgacgacctgggccctgggcctctgaaggcaagtgcgggtgcatgaggtgggggtccgggttgcgggggtggtctggcagggtggaccagcaggcagcctgccccgcggaccctgacagcctggcaacgaggagacgatccggtcggagccaggcgcttgagagaggtgcgcagtgcccgagacccctggcgatggggaggcggtgaccggagcgggcctggccaagggctgaggggctggctcgggaggcaccgccagatcgtttggaggagaaccgcgctgaccgcttcccagccagctttgcaggcgcccgcgccccgccctcgacggtgtctgtgcccggagagggctgtgggggaggctcctgcgggagaaatggcggagcgggagccgctgtgggggcgcccgggaaggccgttggggggcgcccggcgaggccggcgggggtcggcgtcccggctctgtacccagtccgccggaggtctggcgtattctgacaggacacagtgagcgtctgtagaggagaggcttgaaataaaggagcacgaatattgcctggatttctggaggcctactttaaggctggccaattctgcaagaaaggcaaggaggaggagactggctcacagctctggaggacccccttctgtcagctgtggggcttgacaccacttgaacaagaaaaggagggggaaactgcaccacatcagtgaagatccacctccagtggctgctctgctggtggtggagttgctgctgacaaccaccctcaacgggtctgcacccatccaggaaatatctgtcttcctttagcttggttgtacctgttctcactctatctgtattattgaattattgactgagactgtgtttgggaaggaggctgagtgactactggactggatattgactctaactcttattcccaagcttatatccttaatcacctaaagatcagagtgtgaagaaacaaacctgtgacagatctgtggttgaggtttagactacgggaggagtatattacctgactttctttgtaacttgtaccatgactggggcagagattgagcctagtgcccaggccaagcctgaaaagaaggctggggaagaggttatcgctgggcctgagagagagaatgatgtccctctggtggtcagacccaaggttaggacccaggcaactactggggcaaggcccaaaactgagaccaagtctgtgcctgcggcaaggcccaaaactgaggcccaagcaatgtctggggcaaggcccaaaactgaggtccaagtaatgggtggtgcaagacccaaaacggaggctcaaggaatcacaggggccaggcccaaaaccgatgccagggcagtaggtggcgctcgttctaaaactgatgccaaggcaatccctggagcaaggcccaaggatgaggcccaggcatgggcccagagtgaatttgggactgaagcagtgtcacaggcagaaggagtgtcccagactaatgccgttgcttggccactggccactgctgagtctggatcagttactaaatctaagggcctgtctatggatagagaactagtcaatgtggatgctgaaacctttcctggcacccagggtcagaaaggaatccagccctggtttggaccaggggaggagactaatatggggtcttggtgctattccaggcccagggccagagaggaggcctctaatgagtctgggttctggtcagcagatgagacctctacagcgtcttctttctggactggagaagagacaagtgtcagatcatggcccagggaagagtccaataccaggtccaggcacagggctaaacatcagactaatcccaggtccaggcccagatccaagcaagaagcctatgttgattcctggtctggatctgaggatgaggccagcaacccattctccttctgggttggagaaaataccaataacttgttcaggcccagagtcagggaggaggcaaatatcaggtccaagctcaggacaaatagagaagattgttttgaatctgagtctgaagatgagttctataagcagtcctgggttttgcctggagaagaggccaatagtagattcaggcacagagacaaagaagatcctaatactgccttgaaactcagggcccagaaagatgttgacagtgatagggtcaaacaagaacccaggtttgaggaggaagtcattattgggtcctggttctgggcagaaaaagaggccagtttggagggtggagcttcagcaatctgtgaatctgagccaggaactgaggagggggccattggcggatccgcgtactgggctgaggaaaagtccagtttgggggctgtggccagagaagaggccaagccggagtctgaagaagaggccatatttgggtcctggttctgggacagagatgaggcctgctttgacctaaatccctgtcctgtgtacaaggtcagtgataggttcagagatgcagctgaggagcttaatgcatcctccaggccccaaacctgggacgaggtcactgttgaattcaaacctggtctttttcatggggttggcttccgatccacaagcccctttggaattcccgaagaggcttctgaaatgcttgaggcaaagcccaagaacctggaacttagcccagaaggagaagagcaggaatctttgcttcagcctgatcagcctagtcctgagttcacatttcagtatgatccttcctaccggtcagtccgggaaattcgagagcatcttagggccagggagagtgcagagtctgagagttggtcctgcagctgcatacaatgtgagctgaaaattggttctgaagagtttgaagaattccttttattaatggacaaaattcgggatccttttattcatgaaatatctaaaattgcaatgggtatgagaagtgcttctcaatttacccgagatttcattcgagattcaggtgttgtctcacttattgaaaccttgcttaattatccatcctctagagttaggacaagttttttggaaaatatgattcacatggctccaccttatccaaatctaaacatgattgagacattcatatgtcaagtgtgtgaggaaacccttgcacatagtgtggattcccttgagcagctgactggaataaggatgcttagacacctcactatgactattgactatcacacactgattgccaactatatgtccgggtttctctccttattaaccacagccaatgcgagaacgaagtttcacgttctgaaaatgctattgaatttgtctgaaaatcctgctgtggcaaaaaaactattcagtgccaaagctctttcaatatttgtgggtctctttaacatagaagagacaaatgataatattcaaattgttattaaaatgtttcagaatatcagtaacattataaaaagtggaaagatgtccttaattgatgatgatttcagtcttgagccgcttatttctgcatttcgtgaatttgaggagttagctaagcaactacaagcccaaatagacaaccaaaatgatcctgaggtgggacaacaaagttaatatgattaaccacctgccgctgatcagccttatgttcccaaagagccctgagtagtgctttggtgttcacagtctgtttttttgttgtaacttatattttttaatgctgatgttaactttgtcaaactcttgttttgagctggatcattttgtggatgccaaatgaatatcaaaactgaaaacacatttgttgatatttgtcttgctgtccagattgcggtatttttcagtattaagttttcaatgaactgtgtcacctaagtaagctaccctgctattcgttgtttaaatatatggttctctatttgagtctgtgttttcaataaagttctatgttaaaattggc

SEQ ID NO: 11329 - protein, 44 aa, Homo sapiens
MAEREPLWGRPGRPLGGARRGRRGSASRLCTQSAGGLAYSDRTQ

SEQ ID NO: 11330 - DNA, 3985 bp, Homo sapiens
ccgacaccctcgcggcgagcggttcttgccgcatcctgcgcagcccctgcctactttggtgcagaggcgtggggggcgggacgcgtctttcccgttcggatcgcggggaaagcagtggctccaagtgagccagaggagagctgaggagaggagggggaggccgacgacctgggccctgggcctctgaaggcaagtgcgggtgcatgaggtgggggtccgggttgcgggggtggtctggcagggtggaccagcaggcagcctgccccgcggaccctgacagcctggcaacgaggagacgatccggtcggagccaggcgcttgagagaggtgcgcagtgcccgagacccctggcgatggggaggcggtgaccggagcgggcctggccaagggctgaggggctggctcgggaggcaccgccagatcgtttggaggagaaccgcgctgaccgcttcccagccagctttgcaggcgcccgcgccccgccctcgacggtgtctgtgcccggagagggctgtgggggaggctcctgcgggagaaatggcggagcgggagccgctgtgggggcgcccgggaaggccgttggggggcgcccggcgaggccggcgggggtcggcgtcccggctctgtacccagtccgccggaggcctactttaaggctggccaattctgcaagaaaggcaaggaggaggagactggctcacagctctggaggacccccttctgtcagctgtggggcttgacaccacttgaacaagaaaaggagggggaaactgcaccacatcagtgaagatccacctccagtggctgctctgctggtggtggagttgctgctgacaaccaccctcaacgggtctgcacccatccaggaaatatctgtcttcctttagcttggttgtacctgttctcactctatctgtattattgaattattgactgagactgtgtttgggaaggaggctgagtgactactggactggatattgactctaactcttattcccaagcttatatccttaatcacctaaagatcagagtgtgaagaaacaaacctgtgacagatctgtggttgaggtttagactacgggaggagtatattacctgactttctttgtaacttgtaccatgactggggcagagattgagcctagtgcccaggccaagcctgaaaagaaggctggggaagaggttatcgctgggcctgagagagagaatgatgtccctctggtggtcagacccaaggttaggacccaggcaactactggggcaaggcccaaaactgagaccaagtctgtgcctgcggcaaggcccaaaactgaggcccaagcaatgtctggggcaaggcccaaaactgaggtccaagtaatgggtggtgcaagacccaaaacggaggctcaaggaatcacaggggccaggcccaaaaccgatgccagggcagtaggtggcgctcgttctaaaactgatgccaaggcaatccctggagcaaggcccaaggatgaggcccaggcatgggcccagagtgaatttgggactgaagcagtgtcacaggcagaaggagtgtcccagactaatgccgttgcttggccactggccactgctgagtctggatcagttactaaatctaagggcctgtctatggatagagaactagtcaatgtggatgctgaaacctttcctggcacccagggtcagaaaggaatccagccctggtttggaccaggggaggagactaatatggggtcttggtgctattccaggcccagggccagagaggaggcctctaatgagtctgggttctggtcagcagatgagacctctacagcgtcttctttctggactggagaagagacaagtgtcagatcatggcccagggaagagtccaataccaggtccaggcacagggctaaacatcagactaatcccaggtccaggcccagatccaagcaagaagcctatgttgattcctggtctggatctgaggatgaggccagcaacccattctccttctgggttggagaaaataccaataacttgttcaggcccagagtcagggaggaggcaaatatcaggtccaagctcaggacaaatagagaagattgttttgaatctgagtctgaagatgagttctataagcagtcctgggttttgcctggagaagaggccaatagtagattcaggcacagagacaaagaagatcctaatactgccttgaaactcagggcccagaaagatgttgacagtgatagggtcaaacaagaacccaggtttgaggaggaagtcattattgggtcctggttctgggcagaaaaagaggccagtttggagggtggagcttcagcaatctgtgaatctgagccaggaactgaggagggggccattggcggatccgcgtactgggctgaggaaaagtccagtttgggggctgtggccagagaagaggccaagccggagtctgaagaagaggccatatttgggtcctggttctgggacagagatgaggcctgctttgacctaaatccctgtcctgtgtacaaggtcagtgataggttcagagatgcagctgaggagcttaatgcatcctccaggccccaaacctgggacgaggtcactgttgaattcaaacctggtctttttcatggggttggcttccgatccacaagcccctttggaattcccgaagaggcttctgaaatgcttgaggcaaagcccaagaacctggaacttagcccagaaggagaagagcaggaatctttgcttcagcctgatcagcctagtcctgagttcacatttcagtatgatccttcctaccggtcagtccgggaaattcgagagcatcttagggccagggagagtgcagagtctgagagttggtcctgcagctgcatacaatgtgagctgaaaattggttctgaagagtttgaagaattccttttattaatggacaaaattcgggatccttttattcatgaaatatctaaaattgcaatgggtatgagaagtgcttctcaatttacccgagatttcattcgagattcaggtgttgtctcacttattgaaaccttgcttaattatccatcctctagagttaggacaagttttttggaaaatatgattcacatggctccaccttatccaaatctaaacatgattgagacattcatatgtcaagtgtgtgaggaaacccttgcacatagtgtggattcccttgagcagctgactggaataaggatgcttagacacctcactatgactattgactatcacacactgattgccaactatatgtccgggtttctctccttattaaccacagccaatgcgagaacgaagtttcacgttctgaaaatgctattgaatttgtctgaaaatcctgctgtggcaaaaaaactattcagtgccaaagctctttcaatatttgtgggtctctttaacatagaagagacaaatgataatattcaaattgttattaaaatgtttcagaatatcagtaacattataaaaagtggaaagatgtccttaattgatgatgatttcagtcttgagccgcttatttctgcatttcgtgaatttgaggagttagctaagcaactacaagcccaaatagacaaccaaaatgatcctgaggtgggacaacaaagttaatatgattaaccacctgccgctgatcagccttatgttcccaaagagccctgagtagtgctttggtgttcacagtctgtttttttgttgtaacttatattttttaatgctgatgttaactttgtcaaactcttgttttgagctggatcattttgtggatgccaaatgaatatcaaaactgaaaacacatttgttgatatttgtcttgctgtccagattgcggtatttttcagtattaagttttcaatgaactgtgtcacctaagtaagctaccctgctattcgttgtttaaatatatggttctctatttgagtctgtgttttcaataaagttctatgttaaaattggc

SEQ ID NO: 11331 - protein, 38 aa, Homo sapiens
MAEREPLWGRPGRPLGGARRGRRGSASRLCTQSAGGLL

SEQ ID NO: 11332 - DNA, 3308 bp, Homo sapiens
ctactttggtgcagaggcgtggggggcgggacgcgtctttcccgttcggatcgcggggaaagcagtggctccaagtgagccagaggagagctgaggagaggagggggaggccgacgacctgggccctgggcctctgaaggtctggcgtattctgacaggacacagtgagcgtctgtagaggagaggcttgaaatatctgtcttcctttagcttggttgtacctgttctcactctatctgtattattgaattattgactgagactgtgtttgggaaggaggctgagtgactactggactggatattgactctaactcttattcccaagcttatatccttaatcacctaaagatcagagtgtgaagaaacaaacctgtgacagatctgtggttgaggtttagactacgggaggagtatattacctgactttctttgtaacttgtaccatgactggggcagagattgagcctagtgcccaggccaagcctgaaaagaaggctggggaagaggttatcgctgggcctgagagagagaatgatgtccctctggtggtcagacccaaggttaggacccaggcaactactggggcaaggcccaaaactgagaccaagtctgtgcctgcggcaaggcccaaaactgaggcccaagcaatgtctggggcaaggcccaaaactgaggtccaagtaatgggtggtgcaagacccaaaacggaggctcaaggaatcacaggggccaggcccaaaaccgatgccagggcagtaggtggcgctcgttctaaaactgatgccaaggcaatccctggagcaaggcccaaggatgaggcccaggcatgggcccagagtgaatttgggactgaagcagtgtcacaggcagaaggagtgtcccagactaatgccgttgcttggccactggccactgctgagtctggatcagttactaaatctaagggcctgtctatggatagagaactagtcaatgtggatgctgaaacctttcctggcacccagggtcagaaaggaatccagccctggtttggaccaggggaggagactaatatggggtcttggtgctattccaggcccagggccagagaggaggcctctaatgagtctgggttctggtcagcagatgagacctctacagcgtcttctttctggactggagaagagacaagtgtcagatcatggcccagggaagagtccaataccaggtccaggcacagggctaaacatcagactaatcccaggtccaggcccagatccaagcaagaagcctatgttgattcctggtctggatctgaggatgaggccagcaacccattctccttctgggttggagaaaataccaataacttgttcaggcccagagtcagggaggaggcaaatatcaggtccaagctcaggacaaatagagaagattgttttgaatctgagtctgaagatgagttctataagcagtcctgggttttgcctggagaagaggccaatagtagattcaggcacagagacaaagaagatcctaatactgccttgaaactcagggcccagaaagatgttgacagtgatagggtcaaacaagaacccaggtttgaggaggaagtcattattgggtcctggttctgggcagaaaaagaggccagtttggagggtggagcttcagcaatctgtgaatctgagccaggaactgaggagggggccattggcggatccgcgtactgggctgaggaaaagtccagtttgggggctgtggccagagaagaggccaagccggagtctgaagaagaggccatatttgggtcctggttctgggacagagatgaggcctgctttgacctaaatccctgtcctgtgtacaaggtcagtgataggttcagagatgcagctgaggagcttaatgcatcctccaggccccaaacctgggacgaggtcactgttgaattcaaacctggtctttttcatggggttggcttccgatccacaagcccctttggaattcccgaagaggcttctgaaatgcttgaggcaaagcccaagaacctggaacttagcccagaaggagaagagcaggaatctttgcttcagcctgatcagcctagtcctgagttcacatttcagtatgatccttcctaccggtcagtccgggaaattcgagagcatcttagggccagggagagtgcagagtctgagagttggtcctgcagctgcatacaatgtgagctgaaaattggttctgaagagtttgaagaattccttttattaatggacaaaattcgggatccttttattcatgaaatatctaaaattgcaatgggtatgagaagtgcttctcaatttacccgagatttcattcgagattcaggtgttgtctcacttattgaaaccttgcttaattatccatcctctagagttaggacaagttttttggaaaatatgattcacatggctccaccttatccaaatctaaacatgattgagacattcatatgtcaagtgtgtgaggaaacccttgcacatagtgtggattcccttgagcagctgactggaataaggatgcttagacacctcactatgactattgactatcacacactgattgccaactatatgtccgggtttctctccttattaaccacagccaatgcgagaacgaagtttcacgttctgaaaatgctattgaatttgtctgaaaatcctgctgtggcaaaaaaactattcagtgccaaagctctttcaatatttgtgggtctctttaacatagaagagacaaatgataatattcaaattgttattaaaatgtttcagaatatcagtaacattataaaaagtggaaagatgtccttaattgatgatgatttcagtcttgagccgcttatttctgcatttcgtgaatttgaggagttagctaagcaactacaagcccaaatagacaaccaaaatgatcctgaggtgggacaacaaagttaatatgattaaccacctgccgctgatcagccttatgttcccaaagagccctgagtagtgctttggtgttcacagtctgtttttttgttgtaacttatattttttaatgctgatgttaactttgtcaaactcttgttttgagctggatcattttgtggatgccaaatgaatatcaaaactgaaaacacatttgttgatatttgtcttgctgtccagattgcggtatttttcagtattaagttttcaatgaactgtgtcacctaagtaagctaccctgctattcgttgtttaaatatatggttctctatttgagtctgtgttttcaataaagttctatgttaaaattggc

SEQ ID NO: 11333 - protein, 838 aa, Homo sapiens; identical to SEQ ID NO: 1800

SEQ ID NO: 11334 - DNA, 3575 bp, Homo sapiens
gtctttcccgttcggatcgcggggaaagcagtggctccaagtgagccagaggagagctgaggagaggagggggaggccgacgacctgggccctgggcctctgaaggcctactttaaggctggccaattctgcaagaaaggcaaggaggaggagactggctcacagctctggaggacccccttctgtcagctgtggggcttgacaccacttgaacaagaaaaggagggggaaactgcaccacatcagtgaaggaggcagccggtccagagagactttctcaaagcccagctgtcccacctagcattcaacatcagtcgcactgcatacgtctcatacaattggaagagactcaaagcctcatttcattctctctccctagatccacctccagtggctgctctgctggtggtggagttgctgctgacaaccaccctcaacgggtctgcacccatccaggaaatatctgtcttcctttagcttggttgtacctgttctcactctatctgtattattgaattattgactgagactgtgtttgggaaggaggctgagtgactactggactggatattgactctaactcttattcccaagcttatatccttaatcacctaaagatcagagtgtgaagaaacaaacctgtgacagatctgtggttgaggtttagactacgggaggagtatattacctgactttctttgtaacttgtaccatgactggggcagagattgagcctagtgcccaggccaagcctgaaaagaaggctggggaagaggttatcgctgggcctgagagagagaatgatgtccctctggtggtcagacccaaggttaggacccaggcaactactggggcaaggcccaaaactgagaccaagtctgtgcctgcggcaaggcccaaaactgaggcccaagcaatgtctggggcaaggcccaaaactgaggtccaagtaatgggtggtgcaagacccaaaacggaggctcaaggaatcacaggggccaggcccaaaaccgatgccagggcagtaggtggcgctcgttctaaaactgatgccaaggcaatccctggagcaaggcccaaggatgaggcccaggcatgggcccagagtgaatttgggactgaagcagtgtcacaggcagaaggagtgtcccagactaatgccgttgcttggccactggccactgctgagtctggatcagttactaaatctaagggcctgtctatggatagagaactagtcaatgtggatgctgaaacctttcctggcacccagggtcagaaaggaatccagccctggtttggaccaggggaggagactaatatggggtcttggtgctattccaggcccagggccagagaggaggcctctaatgagtctgggttctggtcagcagatgagacctctacagcgtcttctttctggactggagaagagacaagtgtcagatcatggcccagggaagagtccaataccaggtccaggcacagggctaaacatcagactaatcccaggtccaggcccagatccaagcaagaagcctatgttgattcctggtctggatctgaggatgaggccagcaacccattctccttctgggttggagaaaataccaataacttgttcaggcccagagtcagggaggaggcaaatatcaggtccaagctcaggacaaatagagaagattgttttgaatctgagtctgaagatgagttctataagcagtcctgggttttgcctggagaagaggccaatagtagattcaggcacagagacaaagaagatcctaatactgccttgaaactcagggcccagaaagatgttgacagtgatagggtcaaacaagaacccaggtttgaggaggaagtcattattgggtcctggttctgggcagaaaaagaggccagtttggagggtggagcttcagcaatctgtgaatctgagccaggaactgaggagggggccattggcggatccgcgtactgggctgaggaaaagtccagtttgggggctgtggccagagaagaggccaagccggagtctgaagaagaggccatatttgggtcctggttctgggacagagatgaggcctgctttgacctaaatccctgtcctgtgtacaaggtcagtgataggttcagagatgcagctgaggagcttaatgcatcctccaggccccaaacctgggacgaggtcactgttgaattcaaacctggtctttttcatggggttggcttccgatccacaagcccctttggaattcccgaagaggcttctgaaatgcttgaggcaaagcccaagaacctggaacttagcccagaaggagaagagcaggaatctttgcttcagcctgatcagcctagtcctgagttcacatttcagtatgatccttcctaccggtcagtccgggaaattcgagagcatcttagggccagggagagtgcagagtctgagagttggtcctgcagctgcatacaatgtgagctgaaaattggttctgaagagtttgaagaattccttttattaatggacaaaattcgggatccttttattcatgaaatatctaaaattgcaatgggtatgagaagtgcttctcaatttacccgagatttcattcgagattcaggtgttgtctcacttattgaaaccttgcttaattatccatcctctagagttaggacaagttttttggaaaatatgattcacatggctccaccttatccaaatctaaacatgattgagacattcatatgtcaagtgtgtgaggaaacccttgcacatagtgtggattcccttgagcagctgactggaataaggatgcttagacacctcactatgactattgactatcacacactgattgccaactatatgtccgggtttctctccttattaaccacagccaatgcgagaacgaagtttcacgttctgaaaatgctattgaatttgtctgaaaatcctgctgtggcaaaaaaactattcagtgccaaagctctttcaatatttgtgggtctctttaacatagaagagacaaatgataatattcaaattgttattaaaatgtttcagaatatcagtaacattataaaaagtggaaagatgtccttaattgatgatgatttcagtcttgagccgcttatttctgcatttcgtgaatttgaggagttagctaagcaactacaagcccaaatagacaaccaaaatgatcctgaggtgggacaacaaagttaatatgattaaccacctgccgctgatcagccttatgttcccaaagagccctgagtagtgctttggtgttcacagtctgtttttttgttgtaacttatattttttaatgctgatgttaactttgtcaaactcttgttttgagctggatcattttgtggatgccaaatgaatatcaaaactgaaaacacatttgttgatatttgtcttgctgtccagattgcggtatttttcagtattaagttttcaatgaactgtgtcacctaagtaagctaccctgctattcgttgtttaaatatatggttctctatttgagtctgtgttttcaataaagttctatgttaaaattggc

SEQ ID NO: 11335 - protein, 838 aa, Homo sapiens; identical to SEQ ID NO: 1800

SEQ ID NO: 11336 - DNA, 534 bp, Homo sapiens
cccgttcggatcgcggggaaagcagtggctccaagtgagccagaggagagctgaggagaggagggggaggccgacgacctgggccctgggcctctgaaggcctactttaaggctggccaattctgcaagaaaggcaaggaggaggagactggctcacagctctggaggacccccttctgtcagctgtggggcttgacaccacttgaacaagaaaaggagggggaaactgcaccacatcagtgaagccgagtggtcctccagagcaaaggccagccttccttccagctgtctggccaaggagcttcaggatcttctagcaagcaccccagaggcagaagactgtcatccatggtacaggactgcggcgaacaagctgactgcgcagtcacgtggggctgacggtgggtcatgtgaccaggctctgcattaggcctgccgagaggagtgttttcttgcatccagaaaagacctgagaggcggacgacacctgtgctccgcagagcagaacgtgggaggaacggcgggatgttaagg

SEQ ID NO: 11337 - protein, 77 aa, Homo sapiens; identical to SEQ ID NO: 11309

SEQ ID NO: 11338 - DNA, 3967 bp, Homo sapiens
gagcgtctgtagaggagaggcttgaaataaaggagcacgaatattgcctggatttctggaggtgtgtggggatgggggttgggcgctaaacactgattggggacccgaatcggggtaggggactgtgaccagagcaagtcaggcatccaggagcacctcctaatcttcacctctctaatggcgctccccccaccttccatccccacctgtctcccccaccgtcctaaactgggggcatgaaagggtgggctttggaggtgggggtgatgagggagacatactgacaagtactaattcacaacctgttttctagaatatgcggcgcccttcccccattttatgctgcgcagagcaaggggatgtggcgcacctagtggtgaatcctcagaattggagaagggagtaatgggaagaatatgacgtcaagagaaggagttgttatctctggaaccttgaagcagggcccaaataaaacgagaatattccaccagcaaaaccccgaatgttgaaagacagataccaataatatggggactcttatccttggcgttggcctgtctaccaagtgctcttctgccaccactcatatcctgactgtcttactttttcatgtgtttgtccataggcctactttaaggctggccaattctgcaagaaaggcaaggaggaggagactggctcacagctctggaggacccccttctgtcagctgtggggcttgacaccacttgaacaagaaaaggagggggaaactgcaccacatcagtgaagatccacctccagtggctgctctgctggtggtggagttgctgctgacaaccaccctcaacgggtctgcacccatccaggaaatatctgtcttcctttagcttggttgtacctgttctcactctatctgtattattgaattattgactgagactgtgtttgggaaggaggctgagtgactactggactggatattgactctaactcttattcccaagcttatatccttaatcacctaaagatcagagtgtgaagaaacaaacctgtgacagatctgtggttgaggtttagactacgggaggagtatattacctgactttctttgtaacttgtaccatgactggggcagagattgagcctagtgcccaggccaagcctgaaaagaaggctggggaagaggttatcgctgggcctgagagagagaatgatgtccctctggtggtcagacccaaggttaggacccaggcaactactggggcaaggcccaaaactgagaccaagtctgtgcctgcggcaaggcccaaaactgaggcccaagcaatgtctggggcaaggcccaaaactgaggtccaagtaatgggtggtgcaagacccaaaacggaggctcaaggaatcacaggggccaggcccaaaaccgatgccagggcagtaggtggcgctcgttctaaaactgatgccaaggcaatccctggagcaaggcccaaggatgaggcccaggcatgggcccagagtgaatttgggactgaagcagtgtcacaggcagaaggagtgtcccagactaatgccgttgcttggccactggccactgctgagtctggatcagttactaaatctaagggcctgtctatggatagagaactagtcaatgtggatgctgaaacctttcctggcacccagggtcagaaaggaatccagccctggtttggaccaggggaggagactaatatggggtcttggtgctattccaggcccagggccagagaggaggcctctaatgagtctgggttctggtcagcagatgagacctctacagcgtcttctttctggactggagaagagacaagtgtcagatcatggcccagggaagagtccaataccaggtccaggcacagggctaaacatcagactaatcccaggtccaggcccagatccaagcaagaagcctatgttgattcctggtctggatctgaggatgaggccagcaacccattctccttctgggttggagaaaataccaataacttgttcaggcccagagtcagggaggaggcaaatatcaggtccaagctcaggacaaatagagaagattgttttgaatctgagtctgaagatgagttctataagcagtcctgggttttgcctggagaagaggccaatagtagattcaggcacagagacaaagaagatcctaatactgccttgaaactcagggcccagaaagatgttgacagtgatagggtcaaacaagaacccaggtttgaggaggaagtcattattgggtcctggttctgggcagaaaaagaggccagtttggagggtggagcttcagcaatctgtgaatctgagccaggaactgaggagggggccattggcggatccgcgtactgggctgaggaaaagtccagtttgggggctgtggccagagaagaggccaagccggagtctgaagaagaggccatatttgggtcctggttctgggacagagatgaggcctgctttgacctaaatccctgtcctgtgtacaaggtcagtgataggttcagagatgcagctgaggagcttaatgcatcctccaggccccaaacctgggacgaggtcactgttgaattcaaacctggtctttttcatggggttggcttccgatccacaagcccctttggaattcccgaagaggcttctgaaatgcttgaggcaaagcccaagaacctggaacttagcccagaaggagaagagcaggaatctttgcttcagcctgatcagcctagtcctgagttcacatttcagtatgatccttcctaccggtcagtccgggaaattcgagagcatcttagggccagggagagtgcagagtctgagagttggtcctgcagctgcatacaatgtgagctgaaaattggttctgaagagtttgaagaattccttttattaatggacaaaattcgggatccttttattcatgaaatatctaaaattgcaatgggtatgagaagtgcttctcaatttacccgagatttcattcgagattcaggtgttgtctcacttattgaaaccttgcttaattatccatcctctagagttaggacaagttttttggaaaatatgattcacatggctccaccttatccaaatctaaacatgattgagacattcatatgtcaagtgtgtgaggaaacccttgcacatagtgtggattcccttgagcagctgactggaataaggatgcttagacacctcactatgactattgactatcacacactgattgccaactatatgtccgggtttctctccttattaaccacagccaatgcgagaacgaagtttcacgttctgaaaatgctattgaatttgtctgaaaatcctgctgtggcaaaaaaactattcagtgccaaagctctttcaatatttgtgggtctctttaacatagaagagacaaatgataatattcaaattgttattaaaatgtttcagaatatcagtaacattataaaaagtggaaagatgtccttaattgatgatgatttcagtcttgagccgcttatttctgcatttcgtgaatttgaggagttagctaagcaactacaagcccaaatagacaaccaaaatgatcctgaggtgggacaacaaagttaatatgattaaccacctgccgctgatcagccttatgttcccaaagagccctgagtagtgctttggtgttcacagtctgtttttttgttgtaacttatattttttaatgctgatgttaactttgtcaaactcttgttttgagctggatcattttgtggatgccaaatgaatatcaaaactgaaaacacatttgttgatatttgtcttgctgtccagattgcggtatttttcagtattaagttttcaatgaactgtgtcacctaagtaagctaccctgctattcgttgtttaaatatatggttctctatttgagtctgtgttttcaataaagttctatgttaaaattggc

SEQ ID NO: 11339 - protein, 64 aa, Homo sapiens
MGTLILGVGLSTKCSSATTHILTVLLFHVFVHRPTLRLANSARKARRRRLAHSSGGPPSVSCGA

SEQ ID NO: 11340 - DNA, 740 bp, Homo sapiens
aagggaatccacactatgtgcaagggtttcctcacacacttgacatatgaatgtctcaatcatgtttagatttggataaggtggagccatgtgaatcatattttccaaaaaacttgtcctaactctagaggatggataattaagcaaggtttcaataagtgagacaacacctgaatctcgaatgaaatctcgggtaaattgagaagcacttctcatacccattgcaattttagatatttcatgaataaaaggatcccgaattttgtccattaataaaaggaattcttcaaactcttcagaaccaattttcagctcacattgtatgcagctgcaggaccaactctcagactctgcactctccctggccctaagatgctctcgaatttcccggactgaccggtaggaaggatcatactgaaatgtgaactcaggactaggctgatcaggctgaagcaaagattcctggctcagattcacagattgctgaagctccaccctccaaactggcctctttttctgcccagaaccaggacccaataatgacttcctcctcaaacctgggttcttgtttgaccctatcactgtcaacatctttctgggccctgagtttcaaggcagtattaggatcttctttgtctctgtgcctgaatctactattggcctcttctccaggcaaaacccaggactgcttatagaactcatcttcagactcagattcaaaacaatcttctctatttgtc

SEQ ID NO: 11341 - protein, 51 aa, Homo sapiens
MTSSSNLGSCLTLSLSTSFWALSFKAVLGSSLSLCLNLLLASSPGKTQDCL

SEQ ID NO: 11342 - DNA, 1410 bp, Homo sapiens
ttctgggacagagatgaggcctgctttgacctaaatccctgtcctgtgtacaaggtcagtgataggttcagagatgcagctgaggagcttaatgcatcctccaggccccaaacctgggacgaggtcactgttgaattcaaacctggtctttttcatggggttggcttccgatccacaagcccctttggaattcccgaagaggcttctgaaatgcttgaggcaaagcccaagaacctggaacttagcccagaaggagaagagcaggaatctttgcttcagcctgatcagcctagtcctgagttcacatttcagtatgatccttcctaccggtcagtccgggaaattcgagagcatcttagggccagggagagtgcagagtctgagagttggtcctgcagctgcatacaatgtgagctgaaaattggttctgaagagtttgaagaattccttttattaatggacaaaattcgggatccttttattcatgaaatatctaaaattgcaatgggtatgagaagtgcttctcaatttacccgagatttcattcgagattcaggtgttgtctcacttattgaaaccttgcttaattatccatcctctagagttaggacaagttttttggaaaatatgattcacatggctccaccttatccaaatctaaacatgattgagacattcatatgtcaagtgtgtgaggaaacccttgcacatagtgtggattcccttgagcagctgactggaataaggatgcttagacacctcactatgactattgactatcacacactgattgccaactatatgtccgggtttctctccttattaaccacagccaatgcgagaacgaagtttcacgttctgaaaatgctattgaatttgtctgaaaatcctgctgtggcaaaaaaactattcagtgccaaagctctttcaatatttgtgggtctctttaacatagaagagacaaatgataatattctgcatttcgtgaatttgaggagttagctaagcaactacaagcccaaatagacaaccaaaatgatcctgaggtgggacaacaaagttaatatgattaaccacctgccgctgatcagccttatgttcccaaagagccctgagtagtgctttggtgttcacagtctgtttttttgttgtaacttatattttttaatgctgatgttaactttgtcaaactcttgttttgagctggatcattttgtggatgccaaatgaatatcaaaactgaaaacacatttgttgatatttgtcttgctgtccagattgcggtatttttcagtattaagttttcaatgaactgtgtcacctaagtaagctaccctgctattcgttgtttaaatatatggttctctatttgagtctgtgttttcaataaagttctatgttaaaattggc

SEQ ID NO: 11343 - protein, 263 aa, Homo sapiens
MLEAKPKNLELSPEGEEQESLLQPDQPSPEFTFQYDPSYRSVREIREHLRARESAESESWSCSCIQCELKIGSEEFEEFLLLMDKIRDPFIHEISKIAMGMRSASQFTRDFIRDSGVVSLIETLLNYPSSRVRTSFLENMIHMAPPYPNLNMIETFICQVCEETLAHSVDSLEQLTGIRMLRHLTMTIDYHTLIANYMSGFLSLLTTANARTKFHVLKMLLNLSENPAVAKKLFSAKALSIFVGLFNIEETNDNILHFVNLRS

SEQ ID NO: 11344 - DNA, 4025 bp, Homo sapiens
aggctctgcattaggcctgccgagaggagtgttttcttgcatccagaaaagacctgagaggcggacgacacctgtgctccgcagagcagaacgtgggaggaacggcgggatgttaaggagctcaagaagcagagagtctacctgcccgacgcgttcgtggagaggagcagcggttgctgttggaggaggtctgtttctttctaggttcctgtagagatctgtatgtagctgttcacttggaagttaattaagaaagaacaaaaactattcatttggattcaaggtccatctccactggtggctgtggtggctttggattgttggaagaccatcaccttcagcaggtctgcacttgggaacaatcattctcccccagcccgagcgtgcctctgccctctgtatcattgacagaggctgtatgtttggaaagagaactttgtgactgcagaactgacagttgactctaattcttgctaccaagtttttccccgacccagtgaaagagtgttaagacttcgacctaggacacattgagaaccaaggccaagactggacagggccatataactgggcttcaaccatggctgggactaagaataagacaagagcccaggccaaaactgaaaaaaaggctgctatacaagctaaagctggagcagagagggaggctactggtgttgttaggcctgtagccaagaccagggccaaagcaaaagccaagacagggtctaagacagatgcagtagcagagatgaaggcagtgtctaagaacaaggttgttgctgagacgaaggaaggagctctgtcagagcctaagactctgggcaaagccatgggagatttcactcccaaggctgggaatgagtccaccagctccacatgtaaaaatgaggctggtactgatgcctggttctgggctggggaagaggccactatcaattcctggttctggaatggagaagaggctggtaatagtttcagcactaagaatgataaacctgaaattggtgcccaggtctgtgctgaggagttggaacctgcggctggggccgattgcaaacctaggtcaggggctgaggaggaggaggaagagaatgttattgggaactggttttgggaaggagatgatactagttttgaccctaatcctaaacctgtgagcaggatagttaagcctcagcctgtgtatgaaattaatgaaaaaaataggcccaaggactggtctgaggtaactatctggcccaatgcccctgctgtaactccagctgtgttaggatttagatcccaggcaccatctgaggcaagccctccttcatatattgttctggcctccgctgaagaaaatgcctgttctttgcctgtggcaacagcttgccgcccttctaggaacactcgctcatgctcacagcctatccctgagtgtcgttttgattctgacccctgcatccagaccatagatgagattagacgtcaaatcaggatcagggaggtaaatgggattaagccatttgcttgtccttgcaaaatggaatgctatatggattctgaggaatttgaaaaacttgttagcttacttaagtcaactactgatcctcttattcataaaatagcacggattgcaatgggtgtccataatgttcacccatttgcccaagagtttattaacgaagtaggtgtagtgacacttattgaaagcttgctcagttttccttcccctgaaatgagaaaaaagactgtaattactctgaatcctccttctggggatgaaagacaacgcaaaattgaattacatgttaagcatatgtgtaaagaaaccatgtcatttcctttgaactcaccgggacagcaatctggattaaagatactaggacaactgactactgattttgtccatcactacattgttgccaattacttttcagagcttttccatttgctgtcctcaggaaattgcaaaaccagaaatcttgttttgaaactacttttaaatatgtctgaaaatccaactgcagccagagacatgatcaatatgaaggcattggcagcattaaaactcatctttaaccagaaagaggcaaaagccaatcttgttagtggtgtggccatatttattaacataaaggagcatatcagaaaaggctcaattgtagttgttgatcacttgagttataatacactcatggccattttcagggaagttaaagagattattgaaacaatgtaaaatgagccagagatagaacattttaagccatcttcaaactctagcaggctgtacattacagtgtacacattatacactgcatctttaacacagagtcacctgtgacaggctctaggtttgagctagactattttgggggtatcaaatgaatattataccttgggctgaaaatgtttgatttttatcttgtctagattggcatatttttaacattttacttaagatagcaaaccagttcgttttaagtaagctaacttgttcattagtatctgtggcttaaaatggcaaaaaagaaaatatccttgagtttgtaatctagttacagaagtaaggcatacacacacacaaagataacagtacctagagagagagtgtgtgtgagtgtgcgtgtctctgtgtgtgcacgtgcacgctcatggccaaatgtgcgcactctacataaaggaggcaggagttcctataggctatttaatgtaagagaaactatttttctcctgttccagctgtatcagatactcgttccgcaacacagaaatgactcagaatctcagacaaaatgtattatttgttcaattttaattttgctactacattcataactcttaaattgttaggctgtttcatttacatcaaagttatctcacaaaagagaaggcaggaaacgttttgtgagtgcctattctatgtcaaacactgtgttggcaccatattttacaagtttttttcctcttctcacagtgatcttgtgagttagttacttatatttttattagaactcattattctgggtaccctccaatgagaattagagaggttaaataccttttcctagattcccacagcaggaaggtggcatagctgttttgtctgacaccagaacccatctcaccacactgctttacagtcttcctgaaggacattttgaggtgggggggccttcaaagctcagagactggtttgaatggtttaattttgcaatggatcatgtccatgccaggtgttacaattcttaacttcctccaaattcgtgtgtccattagacatttggctacatctggctggaggtcaggagaaaattctgaggtaaatagatggattttatctggcagtgtcgaaaatagtaggagcctaaaactttgttcaatgagtaagatgtagatttggagtcatcagcaggggaaacttgttagatgtcctttgtatctttttctatccatttgtattttttctttcccaaagagctgaaatcattttataccctgaatttaaaaggtaattgcttttttcctccttgcgaaatcataccttaattttttttttttttttttttaccatttatgatttattctcctatgtgtcatatgaaaggccaaggggctttatcttttactagtaggcaagcctgggcatttctgcatttgtgccagctaacactacaaaatagacttaattagagaaatttagacccagaattgcagcttcaacaacacaaaacaggaaagctagaagaggttgctgtgtcaacctacaagatagtgattcttggaagttggtatggaccagaaagcattcccaggacatttaggctatggctgagttctctaagactcagggtgggaattataatccctggtctaagctgatatgaaagtttctatgtgtgaaaatatggagttatatgctttgagattttctgccagttaaactaaaacaagatcatactgtaaatgtttgtaacttgcttccccccactgtatactgtaaacatctttgcatgtcaataaatatgcctctacaacat

SEQ ID NO: 11345 - protein, 34 aa, Homo sapiens
MLRSSRSRESTCPTRSWRGAAVAVGGGLFLSRFL

SEQ ID NO: 11346 - DNA, 4405 bp, Homo sapiens
aggctctgcattaggcctgccgagaggagtgttttcttgcatccagaaaagacctgagaggcggacgacacctgtgctccgcagagcagaacgtgggaggaacggcgggatgttaaggagctcaagaagcagagagtctacctgcccgacgcgttcgtggagaggagcagcggttgctgttggaggaggtctgtttctttctaggttcctgtagagatctgtatgtagctgttcacttggaagttaattaagaaagaacaaaaactattcatttggattcaaggtccatctccactggtggctgtggtggctttggattgttggaagaccatcaccttcagcaggtctgcacttgggaacaatcattctcccccagcccgagcgtgcctctgccctctgtatcattgacagaggctgtatgtttggaaagagaactttgtgactgcagaactgacagttgactctaattcttgctaccaagtttttccccgacccagtgaaagagtgttaagacttcgacctaggacacattgagaaccaaggccaagactggacagggccatataactgggcttcaaccatggctgggactaagaataagacaagagcccaggccaaaactgaaaaaaaggctgctatacaagctaaagctggagcagagagggaggctactggtgttgttaggcctgtagccaagaccagggccaaagcaaaagccaagacagggtctaagacagatgcagtagcagagatgaaggcagtgtctaagaacaaggttgttgctgagacgaaggaaggagctctgtcagagcctaagactctgggcaaagccatgggagatttcactcccaaggctgggaatgagtccaccagctccacatgtaaaaatgaggctggtactgatgcctggttctgggctggggaagaggccactatcaattcctggttctggaatggagaagaggctggtaatagtttcagcactaagaatgataaacctgaaattggtgcccaggtctgtgctgaggagttggaacctgcggctggggccgattgcaaacctaggtcaggggctgaggaggaggaggaagagaatgttattgggaactggttttgggaaggagatgatactagttttgaccctaatcctaaacctgtgagcaggatagttaagcctcagcctgtgtatgaaattaatgaaaaaaataggcccaaggactggtctgaggtaactatctggcccaatgcccctgctgtaactccagctgtgttaggatttagatcccaggcaccatctgaggcaagccctccttcatatattgttctggcctccgctgaagaaaatgcctgttctttgcctgtggcaacagcttgccgcccttctaggaacactcgctcatgctcacagcctatccctgagtgtcgttttgattctgacccctgcatccagaccatagatgagattagacgtcaaatcaggatcagggaggtaaatgggattaagccatttgcttgtccttgcaaaatggaatgctatatggattctgaggaatttgaaaaacttgttagcttacttaagtcaactactgatcctcttattcataaaatagcacggattgcaatgggtgtccataatgttcacccatttgcccaagagtttattaacgaagtaggtgtagtgacacttattgaaagcttgctcagttttccttcccctgaaatgagaaaaaagactgtaattactctgaatcctccttctggggatgaaagacaacgcaaaattgaattacatgttaagcatatgtgtaaagaaaccatgtcatttcctttgaactcaccgggacagcaatctggattaaagatactaggacaactgactactgattttgtccatcactacattgttgccaattacttttcagagcttttccatttgctgtcctcaggaaattgcaaaaccagaaatcttgttttgaaactacttttaaatatgtctgaaaatccaactgcagccagagacatgatcaatatgaaggcattggcagcattaaaactcatctttaaccagaaagaggcaaaagccaatcttgttagtggtgtggccatatttattaacataaaggagcatatcagaaaaggctcaattgtagttgttgatcacttgagttataatacactcatggccattttcagggaagttaaagagattattgaaacaatgtaaaatgagccagagatagaacattttaagccatcttcaaactctagcaggctgtacattacagtgtacacattatacactgcatctttaacacagagtcacctgtgacaggctctaggtttgagctagactattttgggggtatcaaatgaatattataccttgggctgaaaatgtttgatttttatcttgtctagattggcatatttttaacattttacttaagatagcaaaccagttcgttttaagtaagctaacttgttcattagtatctgtggcttaaaatggcaaaaaagaaaatatccttgagtttgtaatctagttacagaagtaaggcatacacacacacaaagataacagtacctagagagagagtgtgtgtgagtgtgcgtgtctctgtgtgtgcacgtgcacgctcatggccaaatgtgcgcactctacataaaggaggcaggagttcctataggctatttaatgtaagagaaactatttttctcctgttccagctgtatcagatactcgttccgcaacacagaaatgactcagaatctcagacaaaatgtattatttgttcaattttaattttgctactacattcataactcttaaattgttaggctgtttcatttacatcaaagttatctcacaaaagagaaggcaggaaacgttttgtgagtgcctattctatgtcaaacactgtgttggcaccatattttacaagtttttttcctcttctcacagtgatcttgtgagttagttacttatatttttattagaactcattattctgggtaccctccaatgagaattagagaggttaaataccttttcctagattcccacagcaggaaggtggcatagctgttttgtctgacaccagaacccatctcaccacactgctttacagtcttcctgaaggacattttgaggtgggggggccttcaaagctcagagactggtttgaatggtttaattttgcaatggatcatgtccatgccaggtgttacaattcttaacttcctccaaattcgtgtgtccattagacatttggctacatctggctggaggtcaggagaaaattctgaggtaaatagatggattttatctggcagtgtcgaaaatagtaggagcctaaaactttgttcaatgagtaagatgtagatttggagtcatcagcaggggaaacttgttagatgtcctttgtatctttttctatccatttgtattttttctttcccaaagagctgaaatcattttataccctgaatttaaaaggtaattgcttttttcctccttgcgaaatcataccttaattttttttttttttttttttaccatttatgatttattctcctatgtgtcatatgaaaggccaaggggctttatcttttactagtaggcaagcctgggcatttctgcatttgtgccagctaacactacaaaatagacttaattagagaaatttagacccagaattgcagcttcaacaacacaaaacaggaaagctagaagaggttgctgtgtcaacctacaagatagtgattcttggaagttggtatggaccagaaagcattcccaggacatttaggctatggctgagttctctaagactcagggtgggaattataatccctggtctaagctgatatgaaagtttctatgtgtgaaaatatggagttatatgctttgagattttctgccagttaaactaaaacaagatcatactgtaaatgtttgtaacttgcttccccccactgtatactgtaaacatctttgcatgtcaataaatatgcctctacaacatatttttgaatcacttaatatttttcccatgttaacagttggtatatagtgttgtaaacctttattgcatattctcataacatacaatatacacattcttttgcaaaaatgggaacacagtattgagacttgccttttcctcttaacacttatcttttcaatttagtattatatagatctgtcacatgctttttatctaataactttatagaaatataattgccatacattaagctgcatgttgaaagtatacagtgtgatcagttttggaatgtatatacacacaaaaccataaccacaatcaaaattgtaaatacattcatcacccaccaaagctactttttttttgagacagagtcttgctctgtcacccaggctgga

SEQ ID NO: 11347 - protein, 34 aa, Homo sapiens; identical to SEQ ID NO: 11345

SEQ ID NO: 11348 - DNA, 564 bp, Homo sapiens
aggctctgcattaggcctgccgagaggagtgttttcttgcatccagaaaagacctgagaggcggacgacacctgtgctccgcagagcagaacgtgggaggaacggcgggatgttaaggagctcaagaagcagagagtctacctgcccgacgcgttcgtggagaggagcagcggttgctgttggaggaggtgggtgcaaggacggcagatggcatccctgagaggtggtgactgagactagatgcgggtgcagattgatactggaaaagcagtttctattgagcccccaaatgaagagtgagtgcagatgaagaggaggcaggactcacaagcccttgaactttattccagatctgttagcacctacaggaccctgcaccaggatttcatctgtactatcagcttcttcaaagagagagaggttgttgactcttcatgtggatgtctgagctcatatcaggtgtctgaaagaggcagattctgaggatttgggtcatgatggctgccaaagcttctactcctgacttaaagggcaacaatcctaggagaccaccagcacttacat

SEQ ID NO: 11349 - protein, 58 aa, Homo sapiens
MKRRQDSQALELYSRSVSTYRTLHQDFICTISFFKEREVVDSSCGCLSSYQVSERGRF

SEQ ID NO: 11350 - DNA, 590 bp, Homo sapiens
attaggcctgccgagaggagtgttttcttgcatccagaaaagacctgagaggcggacgacacctgtgctccgcagagcagaacgtgggaggaacggcgggatgttaaggagctcaagaagcagagagtctacctgcccgacgcgttcgtggagaggagcagcggttgctgttggaggagtattcaggcagtggggatggctgataccagctcaaaactggcggagggtggaggagggcagaagagaacacatacatctgccttttgctccaaggctccagctggctggggatgcaagagaggaatgaacctcaatcccggcagttctaggaaaaggaggaggagacatagactcgaggggaggaaacctagatgctgtgggcccttcacctaggatttctcattaggatactccaagcttctcgacccccaaggggattcctggatctcagccccatgcagcaggatctcattcccattgagggacacaaagtgggttgctactccgtgtgagctctctctccctgctgtcttgggcctcagaggagggtctttctggggaccacctacagaaactgcttcatggatagt

SEQ ID NO: 11351 - protein, 68 aa, Homo sapiens
MLRSSRSRESTCPTRSWRGAAVAVGGVFRQWGWLIPAQNWRRVEEGRREHIHLPFAPRLQLAGDAREE

SEQ ID NO: 11352 - DNA, 4080 bp, Homo sapiens
attaggcctgccgagaggagtgttttcttgcatccagaaaagacctgagaggcggacgacacctgtgctccgcagagcagaacgtgggaggaacggcgggatgttaaggagctcaagaagcagagagtctacctgcccgacgcgttcgtggagaggagcagcggttgctgttggaggaggtgggtgcaaggacggcagatggcatccctgagaggtggtgactgagactagatgcgggtgcaggtctgtttctttctaggttcctgtagagatctgtatgtagctgttcacttggaagttaattaagaaagaacaaaaactattcatttggattcaaggtccatctccactggtggctgtggtggctttggattgttggaagaccatcaccttcagcaggtctgcacttgggaacaatcattctcccccagcccgagcgtgcctctgccctctgtatcattgacagaggctgtatgtttggaaagagaactttgtgactgcagaactgacagttgactctaattcttgctaccaagtttttccccgacccagtgaaagagtgttaagacttcgacctaggacacattgagaaccaaggccaagactggacagggccatataactgggcttcaaccatggctgggactaagaataagacaagagcccaggccaaaactgaaaaaaaggctgctatacaagctaaagctggagcagagagggaggctactggtgttgttaggcctgtagccaagaccagggccaaagcaaaagccaagacagggtctaagacagatgcagtagcagagatgaaggcagtgtctaagaacaaggttgttgctgagacgaaggaaggagctctgtcagagcctaagactctgggcaaagccatgggagatttcactcccaaggctgggaatgagtccaccagctccacatgtaaaaatgaggctggtactgatgcctggttctgggctggggaagaggccactatcaattcctggttctggaatggagaagaggctggtaatagtttcagcactaagaatgataaacctgaaattggtgcccaggtctgtgctgaggagttggaacctgcggctggggccgattgcaaacctaggtcaggggctgaggaggaggaggaagagaatgttattgggaactggttttgggaaggagatgatactagttttgaccctaatcctaaacctgtgagcaggatagttaagcctcagcctgtgtatgaaattaatgaaaaaaataggcccaaggactggtctgaggtaactatctggcccaatgcccctgctgtaactccagctgtgttaggatttagatcccaggcaccatctgaggcaagccctccttcatatattgttctggcctccgctgaagaaaatgcctgttctttgcctgtggcaacagcttgccgcccttctaggaacactcgctcatgctcacagcctatccctgagtgtcgttttgattctgacccctgcatccagaccatagatgagattagacgtcaaatcaggatcagggaggtaaatgggattaagccatttgcttgtccttgcaaaatggaatgctatatggattctgaggaatttgaaaaacttgttagcttacttaagtcaactactgatcctcttattcataaaatagcacggattgcaatgggtgtccataatgttcacccatttgcccaagagtttattaacgaagtaggtgtagtgacacttattgaaagcttgctcagttttccttcccctgaaatgagaaaaaagactgtaattactctgaatcctccttctggggatgaaagacaacgcaaaattgaattacatgttaagcatatgtgtaaagaaaccatgtcatttcctttgaactcaccgggacagcaatctggattaaagatactaggacaactgactactgattttgtccatcactacattgttgccaattacttttcagagcttttccatttgctgtcctcaggaaattgcaaaaccagaaatcttgttttgaaactacttttaaatatgtctgaaaatccaactgcagccagagacatgatcaatatgaaggcattggcagcattaaaactcatctttaaccagaaagaggcaaaagccaatcttgttagtggtgtggccatatttattaacataaaggagcatatcagaaaaggctcaattgtagttgttgatcacttgagttataatacactcatggccattttcagggaagttaaagagattattgaaacaatgtaaaatgagccagagatagaacattttaagccatcttcaaactctagcaggctgtacattacagtgtacacattatacactgcatctttaacacagagtcacctgtgacaggctctaggtttgagctagactattttgggggtatcaaatgaatattataccttgggctgaaaatgtttgatttttatcttgtctagattggcatatttttaacattttacttaagatagcaaaccagttcgttttaagtaagctaacttgttcattagtatctgtggcttaaaatggcaaaaaagaaaatatccttgagtttgtaatctagttacagaagtaaggcatacacacacacaaagataacagtacctagagagagagtgtgtgtgagtgtgcgtgtctctgtgtgtgcacgtgcacgctcatggccaaatgtgcgcactctacataaaggaggcaggagttcctataggctatttaatgtaagagaaactatttttctcctgttccagctgtatcagatactcgttccgcaacacagaaatgactcagaatctcagacaaaatgtattatttgttcaattttaattttgctactacattcataactcttaaattgttaggctgtttcatttacatcaaagttatctcacaaaagagaaggcaggaaacgttttgtgagtgcctattctatgtcaaacactgtgttggcaccatattttacaagtttttttcctcttctcacagtgatcttgtgagttagttacttatatttttattagaactcattattctgggtaccctccaatgagaattagagaggttaaataccttttcctagattcccacagcaggaaggtggcatagctgttttgtctgacaccagaacccatctcaccacactgctttacagtcttcctgaaggacattttgaggtgggggggccttcaaagctcagagactggtttgaatggtttaattttgcaatggatcatgtccatgccaggtgttacaattcttaacttcctccaaattcgtgtgtccattagacatttggctacatctggctggaggtcaggagaaaattctgaggtaaatagatggattttatctggcagtgtcgaaaatagtaggagcctaaaactttgttcaatgagtaagatgtagatttggagtcatcagcaggggaaacttgttagatgtcctttgtatctttttctatccatttgtattttttctttcccaaagagctgaaatcattttataccctgaatttaaaaggtaattgcttttttcctccttgcgaaatcataccttaattttttttttttttttttttaccatttatgatttattctcctatgtgtcatatgaaaggccaaggggctttatcttttactagtaggcaagcctgggcatttctgcatttgtgccagctaacactacaaaatagacttaattagagaaatttagacccagaattgcagcttcaacaacacaaaacaggaaagctagaagaggttgctgtgtcaacctacaagatagtgattcttggaagttggtatggaccagaaagcattcccaggacatttaggctatggctgagttctctaagactcagggtgggaattataatccctggtctaagctgatatgaaagtttctatgtgtgaaaatatggagttatatgctttgagattttctgccagttaaactaaaacaagatcatactgtaaatgtttgtaacttgcttccccccactgtatactgtaaacatctttgcatgtcaataaatatgcctctacaacat

SEQ ID NO: 11353 - protein, 36 aa, Homo sapiens
MLRSSRSRESTCPTRSWRGAAVAVGGGGCKDGRWHP

SEQ ID NO: 11354 - DNA, 4460 bp, Homo sapiens
attaggcctgccgagaggagtgttttcttgcatccagaaaagacctgagaggcggacgacacctgtgctccgcagagcagaacgtgggaggaacggcgggatgttaaggagctcaagaagcagagagtctacctgcccgacgcgttcgtggagaggagcagcggttgctgttggaggaggtgggtgcaaggacggcagatggcatccctgagaggtggtgactgagactagatgcgggtgcaggtctgtttctttctaggttcctgtagagatctgtatgtagctgttcacttggaagttaattaagaaagaacaaaaactattcatttggattcaaggtccatctccactggtggctgtggtggctttggattgttggaagaccatcaccttcagcaggtctgcacttgggaacaatcattctcccccagcccgagcgtgcctctgccctctgtatcattgacagaggctgtatgtttggaaagagaactttgtgactgcagaactgacagttgactctaattcttgctaccaagtttttccccgacccagtgaaagagtgttaagacttcgacctaggacacattgagaaccaaggccaagactggacagggccatataactgggcttcaaccatggctgggactaagaataagacaagagcccaggccaaaactgaaaaaaaggctgctatacaagctaaagctggagcagagagggaggctactggtgttgttaggcctgtagccaagaccagggccaaagcaaaagccaagacagggtctaagacagatgcagtagcagagatgaaggcagtgtctaagaacaaggttgttgctgagacgaaggaaggagctctgtcagagcctaagactctgggcaaagccatgggagatttcactcccaaggctgggaatgagtccaccagctccacatgtaaaaatgaggctggtactgatgcctggttctgggctggggaagaggccactatcaattcctggttctggaatggagaagaggctggtaatagtttcagcactaagaatgataaacctgaaattggtgcccaggtctgtgctgaggagttggaacctgcggctggggccgattgcaaacctaggtcaggggctgaggaggaggaggaagagaatgttattgggaactggttttgggaaggagatgatactagttttgaccctaatcctaaacctgtgagcaggatagttaagcctcagcctgtgtatgaaattaatgaaaaaaataggcccaaggactggtctgaggtaactatctggcccaatgcccctgctgtaactccagctgtgttaggatttagatcccaggcaccatctgaggcaagccctccttcatatattgttctggcctccgctgaagaaaatgcctgttctttgcctgtggcaacagcttgccgcccttctaggaacactcgctcatgctcacagcctatccctgagtgtcgttttgattctgacccctgcatccagaccatagatgagattagacgtcaaatcaggatcagggaggtaaatgggattaagccatttgcttgtccttgcaaaatggaatgctatatggattctgaggaatttgaaaaacttgttagcttacttaagtcaactactgatcctcttattcataaaatagcacggattgcaatgggtgtccataatgttcacccatttgcccaagagtttattaacgaagtaggtgtagtgacacttattgaaagcttgctcagttttccttcccctgaaatgagaaaaaagactgtaattactctgaatcctccttctggggatgaaagacaacgcaaaattgaattacatgttaagcatatgtgtaaagaaaccatgtcatttcctttgaactcaccgggacagcaatctggattaaagatactaggacaactgactactgattttgtccatcactacattgttgccaattacttttcagagcttttccatttgctgtcctcaggaaattgcaaaaccagaaatcttgttttgaaactacttttaaatatgtctgaaaatccaactgcagccagagacatgatcaatatgaaggcattggcagcattaaaactcatctttaaccagaaagaggcaaaagccaatcttgttagtggtgtggccatatttattaacataaaggagcatatcagaaaaggctcaattgtagttgttgatcacttgagttataatacactcatggccattttcagggaagttaaagagattattgaaacaatgtaaaatgagccagagatagaacattttaagccatcttcaaactctagcaggctgtacattacagtgtacacattatacactgcatctttaacacagagtcacctgtgacaggctctaggtttgagctagactattttgggggtatcaaatgaatattataccttgggctgaaaatgtttgatttttatcttgtctagattggcatatttttaacattttacttaagatagcaaaccagttcgttttaagtaagctaacttgttcattagtatctgtggcttaaaatggcaaaaaagaaaatatccttgagtttgtaatctagttacagaagtaaggcatacacacacacaaagataacagtacctagagagagagtgtgtgtgagtgtgcgtgtctctgtgtgtgcacgtgcacgctcatggccaaatgtgcgcactctacataaaggaggcaggagttcctataggctatttaatgtaagagaaactatttttctcctgttccagctgtatcagatactcgttccgcaacacagaaatgactcagaatctcagacaaaatgtattatttgttcaattttaattttgctactacattcataactcttaaattgttaggctgtttcatttacatcaaagttatctcacaaaagagaaggcaggaaacgttttgtgagtgcctattctatgtcaaacactgtgttggcaccatattttacaagtttttttcctcttctcacagtgatcttgtgagttagttacttatatttttattagaactcattattctgggtaccctccaatgagaattagagaggttaaataccttttcctagattcccacagcaggaaggtggcatagctgttttgtctgacaccagaacccatctcaccacactgctttacagtcttcctgaaggacattttgaggtgggggggccttcaaagctcagagactggtttgaatggtttaattttgcaatggatcatgtccatgccaggtgttacaattcttaacttcctccaaattcgtgtgtccattagacatttggctacatctggctggaggtcaggagaaaattctgaggtaaatagatggattttatctggcagtgtcgaaaatagtaggagcctaaaactttgttcaatgagtaagatgtagatttggagtcatcagcaggggaaacttgttagatgtcctttgtatctttttctatccatttgtattttttctttcccaaagagctgaaatcattttataccctgaatttaaaaggtaattgcttttttcctccttgcgaaatcataccttaattttttttttttttttttttaccatttatgatttattctcctatgtgtcatatgaaaggccaaggggctttatcttttactagtaggcaagcctgggcatttctgcatttgtgccagctaacactacaaaatagacttaattagagaaatttagacccagaattgcagcttcaacaacacaaaacaggaaagctagaagaggttgctgtgtcaacctacaagatagtgattcttggaagttggtatggaccagaaagcattcccaggacatttaggctatggctgagttctctaagactcagggtgggaattataatccctggtctaagctgatatgaaagtttctatgtgtgaaaatatggagttatatgctttgagattttctgccagttaaactaaaacaagatcatactgtaaatgtttgtaacttgcttccccccactgtatactgtaaacatctttgcatgtcaataaatatgcctctacaacatatttttgaatcacttaatatttttcccatgttaacagttggtatatagtgttgtaaacctttattgcatattctcataacatacaatatacacattcttttgcaaaaatgggaacacagtattgagacttgccttttcctcttaacacttatcttttcaatttagtattatatagatctgtcacatgctttttatctaataactttatagaaatataattgccatacattaagctgcatgttgaaagtatacagtgtgatcagttttggaatgtatatacacacaaaaccataaccacaatcaaaattgtaaatacattcatcacccaccaaagctactttttttttgagacagagtcttgctctgtcacccaggctgga

SEQ ID NO: 11355 - protein, 36 aa, Homo sapiens; identical to SEQ ID NO: 11353

SEQ ID NO: 11356 - DNA, 3978 bp, Homo sapiens
ctgccgagaggagtgttttcttgcatccagaaaagacctgagaggcggacgacacctgtgctccgcagagcagaacgtgggaggaacggcgggatgttaaggagctcaagaagcagagagtctacctgcccgacgcgttcgtggagaggagcagcggttgctgttggaggaggtgggtgcaaggacggcagatggcatccctgagaggtggtgactgagactagatgcgggtgcaggtccatctccactggtggctgtggtggctttggattgttggaagaccatcaccttcagcaggtctgcacttgggaacaatcattctcccccagcccgagcgtgcctctgccctctgtatcattgacagaggctgtatgtttggaaagagaactttgtgactgcagaactgacagttgactctaattcttgctaccaagtttttccccgacccagtgaaagagtgttaagacttcgacctaggacacattgagaaccaaggccaagactggacagggccatataactgggcttcaaccatggctgggactaagaataagacaagagcccaggccaaaactgaaaaaaaggctgctatacaagctaaagctggagcagagagggaggctactggtgttgttaggcctgtagccaagaccagggccaaagcaaaagccaagacagggtctaagacagatgcagtagcagagatgaaggcagtgtctaagaacaaggttgttgctgagacgaaggaaggagctctgtcagagcctaagactctgggcaaagccatgggagatttcactcccaaggctgggaatgagtccaccagctccacatgtaaaaatgaggctggtactgatgcctggttctgggctggggaagaggccactatcaattcctggttctggaatggagaagaggctggtaatagtttcagcactaagaatgataaacctgaaattggtgcccaggtctgtgctgaggagttggaacctgcggctggggccgattgcaaacctaggtcaggggctgaggaggaggaggaagagaatgttattgggaactggttttgggaaggagatgatactagttttgaccctaatcctaaacctgtgagcaggatagttaagcctcagcctgtgtatgaaattaatgaaaaaaataggcccaaggactggtctgaggtaactatctggcccaatgcccctgctgtaactccagctgtgttaggatttagatcccaggcaccatctgaggcaagccctccttcatatattgttctggcctccgctgaagaaaatgcctgttctttgcctgtggcaacagcttgccgcccttctaggaacactcgctcatgctcacagcctatccctgagtgtcgttttgattctgacccctgcatccagaccatagatgagattagacgtcaaatcaggatcagggaggtaaatgggattaagccatttgcttgtccttgcaaaatggaatgctatatggattctgaggaatttgaaaaacttgttagcttacttaagtcaactactgatcctcttattcataaaatagcacggattgcaatgggtgtccataatgttcacccatttgcccaagagtttattaacgaagtaggtgtagtgacacttattgaaagcttgctcagttttccttcccctgaaatgagaaaaaagactgtaattactctgaatcctccttctggggatgaaagacaacgcaaaattgaattacatgttaagcatatgtgtaaagaaaccatgtcatttcctttgaactcaccgggacagcaatctggattaaagatactaggacaactgactactgattttgtccatcactacattgttgccaattacttttcagagcttttccatttgctgtcctcaggaaattgcaaaaccagaaatcttgttttgaaactacttttaaatatgtctgaaaatccaactgcagccagagacatgatcaatatgaaggcattggcagcattaaaactcatctttaaccagaaagaggcaaaagccaatcttgttagtggtgtggccatatttattaacataaaggagcatatcagaaaaggctcaattgtagttgttgatcacttgagttataatacactcatggccattttcagggaagttaaagagattattgaaacaatgtaaaatgagccagagatagaacattttaagccatcttcaaactctagcaggctgtacattacagtgtacacattatacactgcatctttaacacagagtcacctgtgacaggctctaggtttgagctagactattttgggggtatcaaatgaatattataccttgggctgaaaatgtttgatttttatcttgtctagattggcatatttttaacattttacttaagatagcaaaccagttcgttttaagtaagctaacttgttcattagtatctgtggcttaaaatggcaaaaaagaaaatatccttgagtttgtaatctagttacagaagtaaggcatacacacacacaaagataacagtacctagagagagagtgtgtgtgagtgtgcgtgtctctgtgtgtgcacgtgcacgctcatggccaaatgtgcgcactctacataaaggaggcaggagttcctataggctatttaatgtaagagaaactatttttctcctgttccagctgtatcagatactcgttccgcaacacagaaatgactcagaatctcagacaaaatgtattatttgttcaattttaattttgctactacattcataactcttaaattgttaggctgtttcatttacatcaaagttatctcacaaaagagaaggcaggaaacgttttgtgagtgcctattctatgtcaaacactgtgttggcaccatattttacaagtttttttcctcttctcacagtgatcttgtgagttagttacttatatttttattagaactcattattctgggtaccctccaatgagaattagagaggttaaataccttttcctagattcccacagcaggaaggtggcatagctgttttgtctgacaccagaacccatctcaccacactgctttacagtcttcctgaaggacattttgaggtgggggggccttcaaagctcagagactggtttgaatggtttaattttgcaatggatcatgtccatgccaggtgttacaattcttaacttcctccaaattcgtgtgtccattagacatttggctacatctggctggaggtcaggagaaaattctgaggtaaatagatggattttatctggcagtgtcgaaaatagtaggagcctaaaactttgttcaatgagtaagatgtagatttggagtcatcagcaggggaaacttgttagatgtcctttgtatctttttctatccatttgtattttttctttcccaaagagctgaaatcattttataccctgaatttaaaaggtaattgcttttttcctccttgcgaaatcataccttaattttttttttttttttttttaccatttatgatttattctcctatgtgtcatatgaaaggccaaggggctttatcttttactagtaggcaagcctgggcatttctgcatttgtgccagctaacactacaaaatagacttaattagagaaatttagacccagaattgcagcttcaacaacacaaaacaggaaagctagaagaggttgctgtgtcaacctacaagatagtgattcttggaagttggtatggaccagaaagcattcccaggacatttaggctatggctgagttctctaagactcagggtgggaattataatccctggtctaagctgatatgaaagtttctatgtgtgaaaatatggagttatatgctttgagattttctgccagttaaactaaaacaagatcatactgtaaatgtttgtaacttgcttccccccactgtatactgtaaacatctttgcatgtcaataaatatgcctctacaacat

SEQ ID NO: 11357 - protein, 56 aa, Homo sapiens
MRVQVHLHWWLWWLWIVGRPSPSAGLHLGTIILPQPERASALCIIDRGCMFGKRTL

SEQ ID NO: 11358 - DNA, 1158 bp, Homo sapiens
cttgcatccagaaaagacctgagaggcggacgacacctgtgctccgcagagcagaacgtgggaggaacggcgggatgttaaggagctcaagaagcagagagtctacctgcccgacgcgttcgtggagaggagcagcggttgctgttggaggaggtccatctccactggtggctgtggtggctttggattgttggaagaccatcaccttcagcaggtctgcacttgggaacaatcattctcccccagcccgagcgtgcctctgccctctgtatcattgacagaggctgtatgtttggaaagagaactttgtgactgcagaactgacagttgactctaattcttgctaccaagtttttccccgacccagtgaaagagtgttaagacttcgacctaggacacattgagaaccaaggccaagactggacagggccatataactgggcttcaaccatggctgggactaagaataagacaagagcccaggccaaaactgaaaaaaaggctgctatacaagctaaagctggagcagagagggaggctactggtgttgttaggcctgtagccaagaccagggccaaagcaaaagccaagacagggtctaagacagatgcagtagcagagatgaaggcagtgtctaagaacaaggttgttgctgagacgaaggaaggagctctgtcagagcctaagactctgggcaaagccatgggagatttcactcccaaggctgggaatgagtccaccagctccacatgtaaaaatgaggctggtactgatgcctggttctgggctggggaagaggccactatcaattcctggttctggaatggagaagaggctggtaatagtttcagcactaagaatgataaacctgaaattggtgcccaggtctgtgctgaggagttggaacctgcggctggggccgattgcaaacctaggtcaggggctgaggaggaggaggaagagaatgttattgggaactggttttgggaaggagatgatactagttttgaccctaatcctaaacctgtgagcaggatagttaagcctcagcctgtgtatgaaattaatgaaaaaaataggcccaaggactggtctgaggtaactatctggcccaatgcccctgctgtaactccagctgtgttaggatttagatcccag

SEQ ID NO: 11359 - protein, 67 aa, Homo sapiens
MLRSSRSRESTCPTRSWRGAAVAVGGGPSPLVAVVALDCWKTITFSRSALGNNHSPPARACLCPLYH

SEQ ID NO: 11360 - DNA, 559 bp, Homo sapiens
atccagaaaagacctgagaggcggacgacacctgtgctccgcagagcagaacgtgggaggaacggcgggatgttaaggagctcaagaagcagagagtctacctgcccgacgcgttcgtggagaggagcagcggttgctgttggaggaggaactcagagtggttttccagatgggaatcacattgctctctgtccctgagatcttgctggagacagggctactcagtccctctttgccagattgatactggaaaagcagtttctattgagcccccaaatgaagagtgagtgcagatgaagaggaggcaggactcacaagcccttgaactttattccagatctgttagcacctacaggaccctgcaccaggatttcatctgtactatcagcttcttcaaagagagagaggttgttgactcttcatgtggatgtctgagctcatatcaggtgtctgaaagaggcagattctgaggatttgggtcatgatggctgccaaagcttctactcctgacttaaagggcaacaatcctaggagaccaccagcacttacatccctggta

SEQ ID NO: 11361 - protein, 58 aa, Homo sapiens; identical to SEQ ID NO: 11349

SEQ ID NO: 11362 - DNA, 473 bp, Homo sapiens
gttaaggagctcaagaagcagagagtctacctgcccgacgcgttcgtggagaggagcagcggttgctgttggaggaggtgggtgcaaggacggcagatggcatccctgagaggtggtgactgagactagatgcgggtgcaggtaatgcctcagatccgcctgctccctcctgccttttgaacacccttgacccctcatcccaaggctcccagcccagtgccctgtgtttgtatgtgtgggtgggggaggtgggcatatggatggagttggcttcaggggagcccagagcggggaaatggtgaagtgacaattcgtgaacacctgtggtgctggatcaggaaaggcaggggtggggatgggaaccgtgagctatgcgtccgcactcattctactctctgtcttcttactggcagtattcaggcagtggggatggctgataccagctcaaaactggcggagggtggaggagggca

SEQ ID NO: 11363 - protein, 79 aa, Homo sapiens
MCGWGRWAYGWSWLQGSPERGNGEVTIREHLWCWIRKGRGGDGNRELCVRTHSTLCLLTGSIQAVGMADTSSKLAEGGG

SEQ ID NO: 11364 - DNA, 1058 bp, Homo sapiens
tttttatttttattttttaatgaataacatagaactagtgttgagggacaggaagcatagagaaagaagcttggactctggaagtgtgattcaaaccccagtctgtctgactgcaaagcctgaatgtttactacttaaaatagtaatttgtgttaatattaagatttattggatttattgggtgatttctatgtgccagggtactctactaagggctctaaatgtattcacttagttaatcctcaaaacaaacttatgaggtaggtgctgctattgtttccattctacatatgaggaagctgaggcacacattggttaagtagcttagccaacctcactgagttggttagcagaggaggtgacattcccacctttgtggtttgaatctggagctgatgtgcattacttctatgctatgtctatattcctccagtgctagttatcaataaaagcatccatgatcattgtaactgtttttacaatcagatcttctgttcctcaaagcttgtagcaaagtatttatcataaagaaattaaacctgaatattgttagacctcctgtcccttatccttttttccctgtttatcagcctattccaccctttccttccttcccaacccaatgcacacacacacacacacacacacaaacacacacacacaaaagggttggagagagttttaaaaatggcagaatgttactagatgttgcaacttgctggtgggcatatgggtgttcattaagctatcttttctacctttgtatatgctagaaattaaaattttaatccaaaaataaataaatattggaatcttaatatacaattttaatacttttatcatttgacatgtcctatgtaatatgctgtgaggatgaaaatacaactccattttcttttgaatatgtgttaaaaataataataaaaattatttttctttgcccagtgatttgaaaatgccacttttatcatcataaacatttataaatgctttggtcactctctcagtgggctttctattttatttcattaaattatatattgttatattggttttaa

SEQ ID NO: 11365 - protein, 71 aa, Homo sapiens [sequence omitted]

SEQ ID NO: 11366 - DNA, 1011 bp, Homo sapiens; identical to SEQ ID NO: 1805

SEQ ID NO: 11367 - protein, 336 aa, Homo sapiens; identical to SEQ ID NO: 1806

SEQ ID NO: 11368 - DNA, 4061 bp, Homo sapiens
gcgccgtatccctccgccccccttcccgacaccctcgcggagagagcggttcttgcagcatcctgcgcagcccctgcccagtttggtgcagaggcgtggggggcgggacgcgtctttgccattctgatagcggggaaagcggtgagaatcgaagtgaggagccgccagaggagagctgaggagaggagggggaggtcgacgacctgggccctgggcctctgaaggtctgtttctttctaggttcctgtagagatctgtatgtagctgttcacttggaagttaattaagaaagaacaaaaactattcatttggattcaaggtccatctccactggtggctgtggtggctttggattgttggaagaccatcaccttcagcaggtctgcacttgggaacaatcattctcccccagcccgagcgtgcctctgccctctgtatcattgacagaggctgtatgtttggaaagagaactttgtgactgcagaactgacagttgactctaattcttgctaccaagtttttccccgacccagtgaaagagtgttaagacttcgacctaggacacattgagaaccaaggccaagactggacagggccatataactgggcttcaaccatggctgggactaagaataagacaagagcccaggccaaaactgaaaaaaaggctgctatacaagctaaagctggagcagagagggaggctactggtgttgttaggcctgtagccaagaccagggccaaagcaaaagccaagacagggtctaagacagatgcagtagcagagatgaaggcagtgtctaagaacaaggttgttgctgagacgaaggaaggagctctgtcagagcctaagactctgggcaaagccatgggagatttcactcccaaggctgggaatgagtccaccagctccacatgtaaaaatgaggctggtactgatgcctggttctgggctggggaagaggccactatcaattcctggttctggaatggagaagaggctggtaatagtttcagcactaagaatgataaacctgaaattggtgcccaggtctgtgctgaggagttggaacctgcggctggggccgattgcaaacctaggtcaggggctgaggaggaggaggaagagaatgttattgggaactggttttgggaaggagatgatactagttttgaccctaatcctaaacctgtgagcaggatagttaagcctcagcctgtgtatgaaattaatgaaaaaaataggcccaaggactggtctgaggtaactatctggcccaatgcccctgctgtaactccagctgtgttaggatttagatcccaggcaccatctgaggcaagccctccttcatatattgttctggcctccgctgaagaaaatgcctgttctttgcctgtggcaacagcttgccgcccttctaggaacactcgctcatgctcacagcctatccctgagtgtcgttttgattctgacccctgcatccagaccatagatgagattagacgtcaaatcaggatcagggaggtaaatgggattaagccatttgcttgtccttgcaaaatggaatgctatatggattctgaggaatttgaaaaacttgttagcttacttaagtcaactactgatcctcttattcataaaatagcacggattgcaatgggtgtccataatgttcacccatttgcccaagagtttattaacgaagtaggtgtagtgacacttattgaaagcttgctcagttttccttcccctgaaatgagaaaaaagactgtaattactctgaatcctccttctggggatgaaagacaacgcaaaattgaattacatgttaagcatatgtgtaaagaaaccatgtcatttcctttgaactcaccgggacagcaatctggattaaagatactaggacaactgactactgattttgtccatcactacattgttgccaattacttttcagagcttttccatttgctgtcctcaggaaattgcaaaaccagaaatcttgttttgaaactacttttaaatatgtctgaaaatccaactgcagccagagacatgatcaatatgaaggcattggcagcattaaaactcatctttaaccagaaagaggcaaaagccaatcttgttagtggtgtggccatatttattaacataaaggagcatatcagaaaaggctcaattgtagttgttgatcacttgagttataatacactcatggccattttcagggaagttaaagagattattgaaacaatgtaaaatgagccagagatagaacattttaagccatcttcaaactctagcaggctgtacattacagtgtacacattatacactgcatctttaacacagagtcacctgtgacaggctctaggtttgagctagactattttgggggtatcaaatgaatattataccttgggctgaaaatgtttgatttttatcttgtctagattggcatatttttaacattttacttaagatagcaaaccagttcgttttaagtaagctaacttgttcattagtatctgtggcttaaaatggcaaaaaagaaaatatccttgagtttgtaatctagttacagaagtaaggcatacacacacacaaagataacagtacctagagagagagtgtgtgtgagtgtgcgtgtctctgtgtgtgcacgtgcacgctcatggccaaatgtgcgcactctacataaaggaggcaggagttcctataggctatttaatgtaagagaaactatttttctcctgttccagctgtatcagatactcgttccgcaacacagaaatgactcagaatctcagacaaaatgtattatttgttcaattttaattttgctactacattcataactcttaaattgttaggctgtttcatttacatcaaagttatctcacaaaagagaaggcaggaaacgttttgtgagtgcctattctatgtcaaacactgtgttggcaccatattttacaagtttttttcctcttctcacagtgatcttgtgagttagttacttatatttttattagaactcattattctgggtaccctccaatgagaattagagaggttaaataccttttcctagattcccacagcaggaaggtggcatagctgttttgtctgacaccagaacccatctcaccacactgctttacagtcttcctgaaggacattttgaggtgggggggccttcaaagctcagagactggtttgaatggtttaattttgcaatggatcatgtccatgccaggtgttacaattcttaacttcctccaaattcgtgtgtccattagacatttggctacatctggctggaggtcaggagaaaattctgaggtaaatagatggattttatctggcagtgtcgaaaatagtaggagcctaaaactttgttcaatgagtaagatgtagatttggagtcatcagcaggggaaacttgttagatgtcctttgtatctttttctatccatttgtattttttctttcccaaagagctgaaatcattttataccctgaatttaaaaggtaattgcttttttcctccttgcgaaatcataccttaattttttttttttttttttttaccatttatgatttattctcctatgtgtcatatgaaaggccaaggggctttatcttttactagtaggcaagcctgggcatttctgcatttgtgccagctaacactacaaaatagacttaattagagaaatttagacccagaattgcagcttcaacaacacaaaacaggaaagctagaagaggttgctgtgtcaacctacaagatagtgattcttggaagttggtatggaccagaaagcattcccaggacatttaggctatggctgagttctctaagactcagggtgggaattataatccctggtctaagctgatatgaaagtttctatgtgtgaaaatatggagttatatgctttgagattttctgccagttaaactaaaacaagatcatactgtaaatgtttgtaacttgcttccccccactgtatactgtaaacatctttgcatgtcaataaatatgcctctacaacat

SEQ ID NO: 11369 - protein, 547 aa, Homo sapiens; identical to SEQ ID NO: 1804

SEQ ID NO: 11370 - DNA, 4441 bp, Homo sapiens
gcgccgtatccctccgccccccttcccgacaccctcgcggagagagcggttcttgcagcatcctgcgcagcccctgcccagtttggtgcagaggcgtggggggcgggacgcgtctttgccattctgatagcggggaaagcggtgagaatcgaagtgaggagccgccagaggagagctgaggagaggagggggaggtcgacgacctgggccctgggcctctgaaggtctgtttctttctaggttcctgtagagatctgtatgtagctgttcacttggaagttaattaagaaagaacaaaaactattcatttggattcaaggtccatctccactggtggctgtggtggctttggattgttggaagaccatcaccttcagcaggtctgcacttgggaacaatcattctcccccagcccgagcgtgcctctgccctctgtatcattgacagaggctgtatgtttggaaagagaactttgtgactgcagaactgacagttgactctaattcttgctaccaagtttttccccgacccagtgaaagagtgttaagacttcgacctaggacacattgagaaccaaggccaagactggacagggccatataactgggcttcaaccatggctgggactaagaataagacaagagcccaggccaaaactgaaaaaaaggctgctatacaagctaaagctggagcagagagggaggctactggtgttgttaggcctgtagccaagaccagggccaaagcaaaagccaagacagggtctaagacagatgcagtagcagagatgaaggcagtgtctaagaacaaggttgttgctgagacgaaggaaggagctctgtcagagcctaagactctgggcaaagccatgggagatttcactcccaaggctgggaatgagtccaccagctccacatgtaaaaatgaggctggtactgatgcctggttctgggctggggaagaggccactatcaattcctggttctggaatggagaagaggctggtaatagtttcagcactaagaatgataaacctgaaattggtgcccaggtctgtgctgaggagttggaacctgcggctggggccgattgcaaacctaggtcaggggctgaggaggaggaggaagagaatgttattgggaactggttttgggaaggagatgatactagttttgaccctaatcctaaacctgtgagcaggatagttaagcctcagcctgtgtatgaaattaatgaaaaaaataggcccaaggactggtctgaggtaactatctggcccaatgcccctgctgtaactccagctgtgttaggatttagatcccaggcaccatctgaggcaagccctccttcatatattgttctggcctccgctgaagaaaatgcctgttctttgcctgtggcaacagcttgccgcccttctaggaacactcgctcatgctcacagcctatccctgagtgtcgttttgattctgacccctgcatccagaccatagatgagattagacgtcaaatcaggatcagggaggtaaatgggattaagccatttgcttgtccttgcaaaatggaatgctatatggattctgaggaatttgaaaaacttgttagcttacttaagtcaactactgatcctcttattcataaaatagcacggattgcaatgggtgtccataatgttcacccatttgcccaagagtttattaacgaagtaggtgtagtgacacttattgaaagcttgctcagttttccttcccctgaaatgagaaaaaagactgtaattactctgaatcctccttctggggatgaaagacaacgcaaaattgaattacatgttaagcatatgtgtaaagaaaccatgtcatttcctttgaactcaccgggacagcaatctggattaaagatactaggacaactgactactgattttgtccatcactacattgttgccaattacttttcagagcttttccatttgctgtcctcaggaaattgcaaaaccagaaatcttgttttgaaactacttttaaatatgtctgaaaatccaactgcagccagagacatgatcaatatgaaggcattggcagcattaaaactcatctttaaccagaaagaggcaaaagccaatcttgttagtggtgtggccatatttattaacataaaggagcatatcagaaaaggctcaattgtagttgttgatcacttgagttataatacactcatggccattttcagggaagttaaagagattattgaaacaatgtaaaatgagccagagatagaacattttaagccatcttcaaactctagcaggctgtacattacagtgtacacattatacactgcatctttaacacagagtcacctgtgacaggctctaggtttgagctagactattttgggggtatcaaatgaatattataccttgggctgaaaatgtttgatttttatcttgtctagattggcatatttttaacattttacttaagatagcaaaccagttcgttttaagtaagctaacttgttcattagtatctgtggcttaaaatggcaaaaaagaaaatatccttgagtttgtaatctagttacagaagtaaggcatacacacacacaaagataacagtacctagagagagagtgtgtgtgagtgtgcgtgtctctgtgtgtgcacgtgcacgctcatggccaaatgtgcgcactctacataaaggaggcaggagttcctataggctatttaatgtaagagaaactatttttctcctgttccagctgtatcagatactcgttccgcaacacagaaatgactcagaatctcagacaaaatgtattatttgttcaattttaattttgctactacattcataactcttaaattgttaggctgtttcatttacatcaaagttatctcacaaaagagaaggcaggaaacgttttgtgagtgcctattctatgtcaaacactgtgttggcaccatattttacaagtttttttcctcttctcacagtgatcttgtgagttagttacttatatttttattagaactcattattctgggtaccctccaatgagaattagagaggttaaataccttttcctagattcccacagcaggaaggtggcatagctgttttgtctgacaccagaacccatctcaccacactgctttacagtcttcctgaaggacattttgaggtgggggggccttcaaagctcagagactggtttgaatggtttaattttgcaatggatcatgtccatgccaggtgttacaattcttaacttcctccaaattcgtgtgtccattagacatttggctacatctggctggaggtcaggagaaaattctgaggtaaatagatggattttatctggcagtgtcgaaaatagtaggagcctaaaactttgttcaatgagtaagatgtagatttggagtcatcagcaggggaaacttgttagatgtcctttgtatctttttctatccatttgtattttttctttcccaaagagctgaaatcattttataccctgaatttaaaaggtaattgcttttttcctccttgcgaaatcataccttaattttttttttttttttttttaccatttatgatttattctcctatgtgtcatatgaaaggccaaggggctttatcttttactagtaggcaagcctgggcatttctgcatttgtgccagctaacactacaaaatagacttaattagagaaatttagacccagaattgcagcttcaacaacacaaaacaggaaagctagaagaggttgctgtgtcaacctacaagatagtgattcttggaagttggtatggaccagaaagcattcccaggacatttaggctatggctgagttctctaagactcagggtgggaattataatccctggtctaagctgatatgaaagtttctatgtgtgaaaatatggagttatatgctttgagattttctgccagttaaactaaaacaagatcatactgtaaatgtttgtaacttgcttccccccactgtatactgtaaacatctttgcatgtcaataaatatgcctctacaacatatttttgaatcacttaatatttttcccatgttaacagttggtatatagtgttgtaaacctttattgcatattctcataacatacaatatacacattcttttgcaaaaatgggaacacagtattgagacttgccttttcctcttaacacttatcttttcaatttagtattatatagatctgtcacatgctttttatctaataactttatagaaatataattgccatacattaagctgcatgttgaaagtatacagtgtgatcagttttggaatgtatatacacacaaaaccataaccacaatcaaaattgtaaatacattcatcacccaccaaagctactttttttttgagacagagtcttgctctgtcacccaggctgga

SEQ ID NO: 11371 - protein, 547 aa, Homo sapiens; identical to SEQ ID NO: 1804

SEQ ID NO: 11372 - DNA, 1200 bp, Homo sapiens
acaccctcgcggagagagcggttcttgcagcatcctgcgcagcccctgcccagtttggtgcagaggcgtggggggcgggacgcgtctttgccattctgatagcggggaaagcggtgagaatcgaagtgaggagccgccagaggagagctgaggagaggagggggaggtcgacgacctgggccctgggcctctcaggtccatctccactggtggctgtggtggctttggattgttggaagaccatcaccttcagcaggtctgcacttgggaacaatcattctcccccagcccgagcgtgcctctgccctctgtatcattgacagaggctgtatgtttggaaagagaactttgtgactgcagaactgacagttgactctaattcttgctaccaagtttttccccgacccagtgaaagagtgttaagacttcgacctaggacacattgagaaccaaggccaagactggacagggccatataactgggcttcaaccatggctgggactaagaataagacaagagcccaggccaaaactgaaaaaaaggctgctatacaagctaaagctggagcagagagggaggctactggtgttgttaggcctgtagccaagaccagggccaaagcaaaagccaagacagggtctaagacagatgcagtagcagagatgaaggcagtgtctaagaacaaggttgttgctgagacgaaggaaggagctctgtcagagcctaagactctgggcaaagccatgggagatttcactcccaaggctgggaatgagtccaccagctccacatgtaaaaatgaggctggtactgatgcctggttctgggctggggaagaggccactatcaattcctggttctggaatggagaagaggctggtaatagtttcagcactaagaatgataaacctgaaattggtgcccaggtctgtgctgaggagttggaacctgcggctggggccgattgcaaacctaggtcaggggctgaggaggaggaggaagagaatgttattgggaactggttttgggaaggagatgatactagttttgaccctaatcctaaacctgtgagcaggatagttaagcctcagcctgtgtatgaaattaatgaaaaaaataggcccaaggactggtctgaggtaactatctggcccaatgcccctgctgtaactccagctgtgttaggatttagatcccag

SEQ ID NO: 11373 - protein, 235 aa, Homo sapiens
MAGTKNKTRAQAKTEKKAAIQAKAGAEREATGVVRPVAKTRAKAKAKTGSKTDAVAEMKAVSKNKVVAETKEGALSEPKTLGKAMGDFTPKAGNESTSSTCKNEAGTDAWFWAGEEATINSWFWNGEEAGNSFSTKNDKPEIGAQVCAEELEPAAGADCKPRSGAEEEEEENVIGNWFWEGDDTSFDPNPKPVSRIVKPQPVYEINEKNRPKDWSEVTIWPNAPAVTPAVLGFRS

SEQ ID NO: 11374 - DNA, 981 bp, Homo sapiens
atcgaagtgaggagccgccagaggagagctgaggagaggagggggaggtcgacgacctgggccctgggcctctgaaggtctgtttctttctaggttcctgtagagatctgtatgtttggaaagagaactttgtgactgcagaactgacagttgactctaattcttgctaccaagtttttccccgacccagtgaaagagtgttaagacttcgacctaggacacattgagaaccaaggccaagactggacagggccatataactgggcttcaaccatggctgggactaagaataagacaagagcccaggccaaaactgaaaaaaaggctgctatacaagctaaagctggagcagagagggaggctactggtgttgttaggcctgtagccaagaccagggccaaagcaaaagccaagacagggtctaagacagatgcagtagcagagatgaaggcagtgtctaagaacaaggttgttgctgagacgaaggaaggagctctgtcagagcctaagactctgggcaaagccatgggagatttcactcccaaggctgggaatgagtccaccagctccacatgtaaaaatgaggctggtactgatgcctggttctgggctggggaagaggccactatcaattcctggttctggaatggagaagaggctggtaatagtttcagcactaagaatgataaacctgaaattggtgcccaggtctgtgctgaggagttggaacctgcggctggggccgattgcaaacctaggtcaggggctgaggaggaggaggaagagaatgttattgggaactggttttgggaaggagatgatactagttttgaccctaatcctaaacctgtgagcaggatagttaagcctcagcctgtgtatgaaattaatgaaaaaaataggcccaaggactggtctgaggtaactatctggcccaatgcccctgctgtaactccagctgtgttaggatttagatcccag

SEQ ID NO: 11375 - protein, 235 aa, Homo sapiens; identical to SEQ ID NO: 11373

SEQ ID NO: 11376 - DNA, 716 bp, Homo sapiens
gagaccaatttggcctggggagaaccgccttcaggcgtttggactcagtggaggttgtgagtgcccagcagtgtggcctgaatctccgtggggtttagggagacgaaaggaccccagatcgacgtcccctcgttcccactttggggatcggcgctctggctgtttcgtgaaggagagagaggttgattccataccctggctattgtgaataatgctgcagtgaacatgggagtacatacatctgtttgaggaactcagagtggttttccagatgggaatcacattgctctctgtccctgagatcttgctggagacagggctactcagtccctctttgccaggtaatctgttccagaagaaacatgtgtcgttctgactgagcccctgcctgtctgtcaccttaagagccagtcaattcatatggtccccatatcaaagtctcctgtgcccagagagaggatttcatttcaaccatcaccatcaccaccatcatcatcatcaccaagagatgttgttgaattgatactggaaaagcagtttctattgagcccccaaatgaagagtgagtgcagatgaagaggaggcaggactcacaagcccttgaactttattccagatctgttagcacctacaggaccctgcaccaggatttcatctgtactatcagcttcttcaaagagagagaggttgttgaattgatattggaaaagcagttt

SEQ ID NO: 11377 - protein, 51 aa, Homo sapiens
MVPISKSPVPRERISFQPSPSPPSSSSPRDVVELILEKQFLLSPQMKSECR

SEQ ID NO: 11378 - DNA, 1805 bp, Homo sapiens
gagaccaatttggcctggggagaaccgccttcaggcgtttggactcagtggaggttgtgagtgcccagcagtgtggcctgaatctccgtggggtttagggagacgaaaggaccccagatcgacgtcccctcgttcccactttggggatcggcgctctggctgtttcgtgaaggagagagaggttgattccataccctggctattgtgaataatgctgcagtgaacatgggagtacatacatctgtttgagattgatactggaaaagcagtttctattgagcccccaaatgaagagtgagtgcagatgaagaggaggcaggactcacaagcccttgaactttattccagatctgttagcacctacaggaccctgcaccaggatttcatctgtactatcagcttcttcaaagagagagaggttgttgagctcagaagtgacaaaagagaattatcaggatggcagtccttataaccagatgcttatcaacattcttcactacattctgaagatgaatttctacaagggaaattgtttatatttgttgttggggatagataaggaaagaagaaaaaggctctggtgagaaacccattgtaccttctggatatgatcactacccaattttatcagtgtcattgatcactaacccagtgcctcgtatggtgccaggcacagagttactccaagaatgtacaataatggctggattctctttctccctgtgcaactcttcatgcatgtgactgaacttatattaagtgtctgaaggaggttcgttctgaggatctgggacatgatgggtgctgaagcttctactcaagatttgaagggcagctgtcctcaggagacccctggcacttccctccatggtgggatgtgatgcctgattccagtgagttcatagagctgaacaaaagtacgttgtggaatagctcctgtgaggttcacaacatagtccggaagatgagaaactactttttttagtaacctggattcccatctaagagatgccttactttatcgtaaagcaatgagttgttcacttgaggagggaacttcatgtttaacatgtatttgcaacaaatttacatacattttctgcctgtatgaatagttgtcagtgatgcccatgaatttctcagatggatgttgaagtatacagttagaaggttagaagatcttcctagcaatctgtgattacggtatgcattcttccatggtttctacgtttttgtctattctataatgaaattttctaagaagccagaaattaattaagtgctacctaaaaatatcaaaatgtcaggtacaagaatttggcattttcaaaattagtaattacaatgtaagtttgccctattataatgatacccagctatgtccagtaacataactagattgttctgaataccgttattatttcccaataatacaaacatcacaatttcagttctgtagtacctggcctacctacccttcccactgccttgccccaggtaaacacagcatgcctgtcactatacattattttacatgcctggaaatatatttaaatggaatcatagaggtggtttcttttttttttttttatcaacacctggcttttttcattcactccacttatttttatatttatccattttattgcatttatctattgatatacttcattctttttgattgctaaatactattgcggtatacaaccacactaaacattttattatccatccatttgtcgatggacattttggttgtttctcatttggggctcttgtaaataaagctgctatgaacatttgtg

SEQ ID NO: 11379 - protein, 55 aa, Homo sapiens
MKRRQDSQALELYSRSVSTYRTLHQDFICTISFFKEREVVELRSDKRELSGWQSL

SEQ ID NO: 11380 - DNA, 2105 bp, Homo sapiens
ggagaaccgccttcaggcgtttggactcagtggaggttgtgagtgcccagcagtgtggcctgaatctccgtggggtttagggagacgaaaggaccccagatcgacgtcccctcgttcccactttggggatcggcgctctggctgtttcgtgaaggagagagaggttgattccataccctggctattgtgaataatgctgcagtgaacatgggagtacatacatctgtttgaggaactcagagtggttttccagatgggaatcacattgctctctgtccctgagatcttgctggagacagggctactcagtccctctttgccagattgatactggaaaagcagtttctattgagcccccaaatgaagagtgagtgcagatgaagaggaggcaggactcacaagcccttgaactttattccagatctgttagcacctacaggaccctgcaccaggatttcatctgtactatcagcttcttcaaagagagagaggttgttgaattgatattggaaaagcagtttcccattgagtctcaaatgaagagagtgcagatgaagaggagctcttcatgtggatgtctgagctcatatcaggtgtctgaaagaggcagattctgaggatttgggtcatgatggctgccaaagcttctactcctgacttaaagggcaacaatcctaggagaccaccagcacttacatccctggtaggacatgacacctgcttatggctcagaagtgacaaaagagaattatcaggatggcagtccttataaccagatgcttatcaacattcttcactacattctgaagatgaatttctacaagggaaattgtttatatttgttgttggggatagataaggaaagaagaaaaaggctctggtgagaaacccattgtaccttctggatatgatcactacccaattttatcagtgtcattgatcactaacccagtgcctcgtatggtgccaggcacagagttactccaagaatgtacaataatggctggattctctttctccctgtgcaactcttcatgcatgtgactgaacttatattaagtgtctgaaggaggttcgttctgaggatctgggacatgatgggtgctgaagcttctactcaagatttgaagggcagctgtcctcaggagacccctggcacttccctccatggtgggatgtgatgcctgattccagtgagttcatagagctgaacaaaagtacgttgtggaatagctcctgtgaggttcacaacatagtccggaagatgagaaactactttttttagtaacctggattcccatctaagagatgccttactttatcgtaaagcaatgagttgttcacttgaggagggaacttcatgtttaacatgtatttgcaacaaatttacatacattttctgcctgtatgaatagttgtcagtgatgcccatgaatttctcagatggatgttgaagtatacagttagaaggttagaagatcttcctagcaatctgtgattacggtatgcattcttccatggtttctacgtttttgtctattctataatgaaattttctaagaagccagaaattaattaagtgctacctaaaaatatcaaaatgtcaggtacaagaatttggcattttcaaaattagtaattacaatgtaagtttgccctattataatgatacccagctatgtccagtaacataactagattgttctgaataccgttattatttcccaataatacaaacatcacaatttcagttctgtagtacctggcctacctacccttcccactgccttgccccaggtaaacacagcatgcctgtcactatacattattttacatgcctggaaatatatttaaatggaatcatagaggtggtttcttttttttttttttatcaacacctggcttttttcattcactccacttatttttatatttatccattttattgcatttatctattgatatacttcattctttttgattgctaaatactattgcggtatacaaccacactaaacattttattatccatccatttgtcgatggacattttggttgtttctcatttggggctcttgtaaataaagctgctatgaacatttgtg

SEQ ID NO: 11381 - protein, 79 aa, Homo sapiens
MKRRQDSQALELYSRSVSTYRTLHQDFICTISFFKEREVVELILEKQFPIESQMKRVQMKRSSSCGCLSSYQVSERGRF

SEQ ID NO: 11382 - DNA, 547 bp, Homo sapiens
aaccgccttcaggcgtttggactcagtggaggttgtgagtgcccagcagtgtggcctgaatctccgtggggtttagggagacgaaaggaccccagatcgacgtcccctcgttcccactttggggatcggcgctctggctgtttcgtgaaggagagagaggtgggtctcttctggccccagtgagtgtggtgtcctgctccagggtgtcccggggctactttccctgtaaaggcgggacgcgggaggatgagacaggttgattccataccctggctattgtgaataatgctgcagtgaacatgggagtacatacatctgtttgaggaactcagagtggttttccagatgggaatcacattgctctctgtccctgagatcttgctggagacagggctactcagtccctctttgccaggtaatctgttccagaagaaacatgtgtcgttctgactgagcccctgcctgtctgtcaccttaagagccagtcaattcatatggtccccatatcaaagtctcctgtgcccagagagaggatttcatttcaacc

SEQ ID NO: 11383 - protein, 34 aa, Homo sapiens
MGITLLSVPEILLETGLLSPSLPGNLFQKKHVSF

SEQ ID NO: 11384 - DNA, 711 bp, Homo sapiens
aaccgccttcaggcgtttggactcagtggaggttgtgagtgcccagcagtgtggcctgaatctccgtggggtttagggagacgaaaggaccccagatcgacgtcccctcgttcccactttggggatcggcgctctggctgtttcgtgaaggagagagaggaactcagagtggttttccagatgggaatcacattgctctctgtccctgagatcttgctggagacagggctactcagtccctctttgccaggtaatctgttccagaagaaacatgtgtcgttctgactgagcccctgcctgtctgtcaccttaagagccagtcaattcatatggtccccatatcaaagtctcctgtgcccagagagaggatttcatttcaaccatcaccatcaccaccatcatcatcatcaccaagagatgttgttgaattgatactggaaaagcagtttctattgagcccccaaatgaagagtgagtgcagatgaagaggaggcaggactcacaagcccttgaactttattccagatctgttagcacctacaggaccctgcaccaggatttcatctgtactatcagcttcttcaaagagagagaggttgttgaattgatattggaaaagcagtttcccattgagtctcaaatgaagagagtgcagatgaagaggaggtaggagtcacaagcccttgaccctcatgctagacccattaccac

SEQ ID NO: 11385 - protein, 62 aa, Homo sapiens [sequence omitted]

SEQ ID NO: 11386 - DNA, 652 bp, Homo sapiens
aaccgccttcaggcgtttggactcagtggaggttgtgagtgcccagcagtgtggcctgaatctccgtggggtttagggagacgaaaggaccccagatcgacgtcccctcgttcccactttggggatcggcgctctggctgtttcgtgaaggagagagaggaactcagagtggttttccagatgggaatcacattgctctctgtccctgagatcttgctggagacagggctactcagtccctctttgccaggtaatctgttccagaagaaacatgtgtcgttctgactgagcccctgcctgtctgtcaccttaagagccagtcaattcatatggtccccatatcaaagtctcctgtgcccagagagaggatttcatttcaaccatcaccatcaccaccatcatcatcatcaccaagagatgttgttgaattgatactggaaaagcagtttctattgagcccccaaatgaagagtgagtgcagatgaagaggaggcaggactcacaagcccttgaactttattccagatctgttagcacctacaggaccctgcaccaggatttcatctgtactatcagcttcttcaaagagagagaggttgttgaattgatattggaaaagcagtttcccattgagtctcaaatgaagaaagag

SEQ ID NO: 11387 - protein, 56 aa, Homo sapiens
MKRRQDSQALELYSRSVSTYRTLHQDFICTISFFKEREVVELILEKQFPIESQMKK

SEQ ID NO: 11388 - DNA, 777 bp, Homo sapiens
cgtttggactcagtggaggttgtgagtgcccagcagtgtggcctgaatctccgtggggtttagggagacgaaaggaccccagatcgacgtcccctcgttcccactttggggatcggcgctctggctgtttcgtgaaggagagagaggttgattccataccctggctattgtgaataatgctgcagtgaacatgggagtacatacatctgtttgaggaactcagagtggttttccagatgggaatcacattgctctctgtccctgagatcttgctggagacagggctactcagtccctctttgccagattgatactggaaaagcagtttctattgagcccccaaatgaagagtgagtgcagatgaagaggaggcaggactcacaagcccttgaactttattccagatctgttagcacctacaggaccctgcaccaggatttcatctgtactatcagcttcttcaaagagagagaggttgttgaattgatattggaaaagcagtttcccattgagtctcaaatgaagagagtgcagatgaagaggagaagactctgtattgaaccaaggtgctctacacagtagcccctactaagctcccagcagatgccagcatcagtcatccatctcttcatgtggatgtctgagctcatatcaggtgtctgaaagaggcagattctgaggatttgggtcatgatggctgccaaagcttctactcctgacttaaagggcaacaatcctaggagaccaccagcacttacatccctggtaggacatgac

SEQ ID NO: 11389 - protein, 73 aa, Homo sapiens
MKRRQDSQALELYSRSVSTYRTLHQDFICTISFFKEREVVELILEKQFPIESQMKRVQMKRRRLCIEPRCSTQ

SEQ ID NO: 11390 - DNA, 482 bp, Homo sapiens
ggaaaagcagtttcccattgagtctcaaatgaagagagtgcagatgaagaggaggtaggagtcacaagcccttgaccctcatgctagacccattaccacccacaggaccttgcagtgggatttcatctgcaccatcagcttcttcagagagagaggttgttgaactctgtattgaaccaaggtgctctacacagtagcccctactaagctcccagcagatgccagcatcagtcatccatctcttcatgtggatgtctgagctcatatcaggtgtctgaaagaggcagattctgaggatttgggtcatgatggctgccaaagcttctactcctgacttaaagggcaacaatcctaggagaccaccagcacttacatccctggtaggacatgacacctgcttatggctcagaagtgacaaaagagaattatcaggatggcagtccttataaccagatgcttatcaacattcttcactacattct

SEQ ID NO: 11391 - protein, 47 aa, Homo sapiens
MMAAKASTPDLKGNNPRRPPALTSLVGHDTCLWLRSDKRELSGWQSL

SEQ ID NO: 11392 - DNA, 2011 bp, Homo sapiens
cccacaggaccttgcagtgggatttcatctgcaccatcagcttcttcagagagagaggttgttgactcttcatgtggatgtctgagctcatatcaggtgtctgaaagaggcagattctgaggatttgggtcatgatggctgccaaagcttctactcctgacttaaagggcaacaatcctaggagaccaccagcacttacatccctggtaggacatgacacctgcttatggctcagaagtgacaaaagagaattatcaggatggcagtccttataaccagatgcttatcaacattcttcactacattctgaagatgaatttctacaagggaaattgtttatgtaagtggtgtgtaccctttgatatgtattgacatagtggcacacatagagttgtgccatttaaactccccaaggggaggcatgtgaggtcggccacagaggactgaagaaattagttaatgctgacatcctatcacatagggtgggtcctggactccgtcatggacctgctgtcatgccattgccacaattggaagacgtggaagtgatcagatgcaatcaaattttgtacacaagcacatcctgatgtagcgatgagggaaagggggaagaggaatgatcattgcttggacttacaggacagaggcagaagggctaggacacaggcactctttatacgcattctttttttttttttttttttgagacggagtatcgcctgttgccaggctggaatgcaatggtgtgatctcagctcactgcaacctccgcctcctgggttcaagcgattctcctgcctcagcctcctgagtagctaggactgtaggcacgcaccaccacgcccagctaattttttgtatttttagtatagtcgaggtttcaccatgttggccaggatggtctccatctcttgagctcgtaatccgcctgcctcggccttctacagtgctgggattacaggcgtcagccaccacacccggccctatatgcattcatttttatgtaaaacatatgcatcaattcttttgtatgaaaacgtttggtcattactgtggtacaacagaagaccaggtcagtaccatatttttttttcatatgtacacggatttttattttgttttagacattgtcttacacacaatagacattcagtatttgttgaaattaatgaaagaaaagagaaacatgaaaacggtctgagaagacaataatctgctttttaatttatagacagcaattaggtcaaacaattatagcaatgatgacaaagaacaatatctgaggtacactcaaaaccttatgagggttatttgccagttttcctggctatttctacaccctttgatctctagtgaatgtttctacttacaactacatattttgtaagttttgcctactgtatttcaatcaacactgtaaaaaatgaagagagtctttttggttcaaatttggtttttagttaattatgtgatgtgtatatgattttttgttaccttttctgtatagatatcaggagaatcgaaaatatgttgatggtggaattgtggtatgacatttttactgactactactctgcaaaagttttatctatgagctctatgggttgttcctggcttttgaaaatttactttaaggaagtgtttttggaaatggattataagtatacaagtatgcaatcttatgtatttgcaactgtctaagatgttatgatactttcctccctgcaatctggcattcatccattcaagacattttaattgaactcttacaatgttcttaatactatgataagccctgaaggtaaactgtgactaaaaatgttgcaggataaaatacaggattcctagttaaatttgaattttagataaacaacattcttatactaaaaattattccatgtttatctgaaattcaaatttagctgagtgtcctgtaactttttattttatttgtttacttgtttgtctgtgataaatatggcagccctagtaaaaataaatatagcccctg

SEQ ID NO: 11393 - protein, 52 aa, Homo sapiens
MTPAYGSEVTKENYQDGSPYNQMLINILHYILKMNFYKGNCLCKWCVPFDMY

SEQ ID NO: 11394 - DNA, 1161 bp, Homo sapiens
gcagatggctgaaattctgatccgatgtggctggttaatgcatgatctgaaaacccctgcactggtgattttgggacagatctagaatataccaataaatatattaacataccaagtagtctaggagcagccactgggcgaacaccaaaccttgcatccctgctgctgtctctgagctcagcagacacgtctttgcagaagagttctataatggtggtacaatggtgccccctcgtgacagaagcttgaactacagcttgaacatcgtgtgacatgatgaatgaatttattgagccccaggaagaaggaaaattaaagaagagcaaagaataatagctggacagaagatgggggtcattgaacctatatcctagttgccagaccagtaaactgaccatgggacctgggggaggcagcagatgaccgaaaacctggagtgatgtggctgaataccgcatgatctgaagactgcactggtggctgcggtatgggtccaaatttttccttaacaaaaacaaaaaaagagcccaaaaccatactgactagtccaggaatagccattaggcaaacaactttttgctaccctggtgttaccgatttctgaactcaacaggtgaattcaaagatatgcctgtctttccagcatggggagctggatttgggtcagctcaggcgcatgatgttgaacagctcttatgagcttctgatagtgcccaggaagtacagaaacaactgtctacaaatctttgaactcaaggcatatcacagggacatttgctttcttcaactagatatctgttttctcataaagagaaacaatgagaaatggtttttcacaatgcctcgttagccctgaggctcagccatcccctagtgctgtgtcccaacatttaaaggccgttgaagtcccactctatgccatatactctgtacaggttttctcatttacccctcaggacagcactgtaaggatggtgtggtcagtcccatttcatagatgaccaaactcaggctttcagagcctaagtcacttctccagataggtggtaggattgaaatgaggttccatccctcatcatccatagacagccctgagtagcctcccttttagaagatgggcttccagggcttgagaaatggtcagattccacccccctgcta

SEQ ID NO: 11395 - protein, 60 aa, Homo sapiens
MRNGFSQCLVSPEAQPSPSAVSQHLKAVEVPLYAIYSVQVFSFTPQDSTVRMVWSVPFHR

SEQ ID NO: 11396 - DNA, 538 bp, Homo sapiens
attatatatctggacttgattatatttccctgaatttcttaattggtatggatctttttaaaatcagaattaagtctcagagaaatagtggttgttatgaaatattaaagtaacacaaaaaattatagaatacaacagacttctacatattcatgtcaacatataaaactttcataggtgagtcaaacacactttaaagtcttctcttattacctcagctgccttctttcccacaggtgaccatgatgcagaatttaggttttacgttttcaagacatttttctatacttttattacatatgcacacatacacacacacacatacacacagagagagagagagagggagagagagcgctggagggagagcgccagagagagagagggagagagggagaggagtggtatctctatcatgtggttgaataggtgatgagaggtccaaggagggatttttgaaaatcatcaattttttgaaacctgatcaagtttaaaaattaatgagaagaaccatctcatctcagatttaagcaatgaa

SEQ ID NO: 11397 - protein, 60 aa, Homo sapiens
MMQNLGFTFSRHFSILLLHMHTYTHTHTHRERERGRESAGGRAPERERERGRGVVSLSCG

SEQ ID NO: 11398 - DNA, 1029 bp, Homo sapiens
cgcacaaccttgctggtctggcccaggcggggggcggggccagcacgatgagcgccccgggcagccccgaccaggcctacgacttcctgctcaagttcctgctggtgggcgacagggacgtaggcaagagtgagatcctggagagcctgcaggacggcacggccgagtccccgtacagtcacctggggggaatcgactacaagacgaccaccatcctgctggacggccagcgggtgaagctgaagctctgggatacgtcggggcagggaagattttgtaccatattccgctcctactctcgtggtgcacaaggagtgatcctggtctacgacattgcaaaccgctggtctttcgagggtatggatcgatggattaagaagattgaggaacatgcccctggtgtccctaaaatcctggtggggaatcgcctacatctggcattcaagaggcaggtgcccagggagcaggcccaggcctacgccgagcgcctgggcgtgaccttctttgaggtcagccctctgtgcaatttcaacatcatagagtctttcacggagctggccaggatagtgctgctgcggcacaggttgaactggctcgggaggccgagcaaggtactgagcttgcaagacctctgctgccgcaccatcgtgtcctgcacacctgtgcatctggtggacaagctcccgctccccattgccttaagaagccacctcaagtccttctccatggctaagggcctgaatgccaggatgatgcgaggcctctcctactccctcaccaccagctccactcacaaaaggagcagcctctgcaaagtgaagatcgtctgcccaccccagagcccacccaaaaactgcaccagaaacagctgcaaaatttcttaaggaaggcaccaaaaggaaacaagctggaatcgctccaggaaaaactctgaatggttacacctggaagagggaagatgcattctagattcaaagaaatacgttttcagtttctcatgggaacaatgctgcttgggaatgtgtgtga

SEQ ID NO: 11399 - protein, 278 aa, Homo sapiens
MSAPGSPDQAYDFLLKFLLVGDRDVGKSEILESLQDGTAESPYSHLGGIDYKTTTILLDGQRVKLKLWDTSGQGRFCTIFRSYSRGAQGVILVYDIANRWSFEGMDRWIKKIEEHAPGVPKILVGNRLHLAFKRQVPREQAQAYAERLGVTFFEVSPLCNFNIIESFTELARIVLLRHRLNWLGRPSKVLSLQDLCCRTIVSCTPVHLVDKLPLPIALRSHLKSFSMAKGLNARMMRGLSYSLTTSSTHKRSSLCKVKIVCPPQSPPKNCTRNSCKIS

SEQ ID NO: 11400 - DNA, 903 bp, Homo sapiens
ggagggtgagcttggcggtgacgcacggccctcacgtgaccgggagctgcagagctacgcagccttcggtgcagtcgtcactcgtgtctcgctaccagctccccgctgccctgcgctcggcgggctggcatccggcccgggggaaagcggaccagcccttctgcaggtctgcggggccaagtgtcccggcggcgcacctcgtggcgagaatcgggagaaggaggagactacaaggataggcccaggagtaatggagtccaaagagaaacgagcagtaaacagtctcagcatggaaaatgccaaccaagaaaatgaagaaaaggagcaagttgctaataaaggggagcccttggccctccctttggatgctggtgaatactgtgtgcctagaggaaatcgtaggcggttccgcgttaggcagcccatcctgcagtatagatgggatatgatgcataggcttggagaaccacaggcaaggatgagagaagagaatatggaaaggattggggaggaggtgagacagctgatggaaaagctgagggaaaagcagttgagtcatagtctgcgggcagtcagcactgacccccctcaccatgaccatcatgatgagttttgccttatgccctgaatcctgatggtttccctaaagttattacggaaacagacccctgctttcgaatttacatgttcatgatgtgcccttgttgtaaacctttacctgtcacttgtttacgtgggtctcctattaccagcttctaattgaatattgtgtttttgaaccagtctgtaagatttttgttagcagaagaattttacctattgcatggaaagatgctcattatagtgaagttaataaagcacctttaaaaagcaatctctatattctttttttgttaaaaattt

SEQ ID NO: 11401 - protein, 125 aa, Homo sapiens; identical to SEQ ID NO: 1808

SEQ ID NO: 11402 - DNA, 1188 bp, Homo sapiens
agagctacgcagccttcggtgcagtcgtcactcgtgtctcgctaccagctccccgctgccctgcgctcggcgggctggcatccggcccgggggaaagcggaccaggtaagggccccggggcccgcgcgccctggctaggccagcagaggctcaccgacccccccgacgagcgcagaacagcgcaggggatccccgccagctttctccacaccccaacattcttgggaacatagtggtcccctggggtggggaagcagtggcggctggggctccaggggcagcagagcaaccaagagcgatggaaaaccattcccgagtccttgcaggaaaacggtgaacaccacggggggcgaggcggccgagggtgggagcggggggcgggagacgcggggcgctggcagtgaggagggccctaggcggagaaggagctagcgttccgctgcagcagccccccctccccacaccccagcccttctgcaggtctgcggggccaagtgtcccggcggcgcacctcgtggcgagaatcgggagaaggaggagactacaaggataggcccaggagtaatggagtccaaagagaaacgagcagtaaacagtctcagcatggaaaatgccaaccaagaaaatgaagaaaaggagcaagttgctaataaaggggagcccttggccctccctttggatgctggtgaatactgtgtgcctagaggaaatcgtaggcggttccgcgttaggcagcccatcctgcagtatagatgggatatgatgcataggcttggagaaccacaggcaaggatgagagaagagaatatggaaaggattggggaggaggtgagacagctgatggaaaagctgagggaaaagcagttgagtcatagtctgcgggcagtcagcactgacccccctcaccatgaccatcatgatgagttttgccttatgccctgaatcctgatggtttccctaaagttattacggaaacagacccctgctttcgaatttacatgttcatgatgtgcccttgttgtaaacctttacctgtcacttgtttacgtgggtctcctattaccagcttctaattgaatattgtgtttttgaaccagtctgtaagatttttgttagcagaagaattttacctattgcatggaaagatgctcattatagtgaagttaataaagcacctttaaaaagcaa

SEQ ID NO: 11403 - protein, 125 aa, Homo sapiens; identical to SEQ ID NO: 1808

SEQ ID NO: 11404 - DNA, 872 bp, Homo sapiens
ggagggtgagcttggcggtgacgcacggccctcacgtgaccgggagctgcagagctacgcagccttcggtgcagtcgtcactcgtgtctcgctaccagctccccgctgccctgcgctcggcgggctggcatccggcccgggggaaagcggaccagcccttctgcaggtctgcggggccaagtgtcccggcggcgcacctcgtggcgagaatcgggagaaggaggagactacaaggataggcccaggagtaatggagtccaaagagaaacgagcagtaaacagtctcagcatggaaaatgccaaccaagaaaatgaagaaaaggagcaagttgctaataaaggggagcccttggccctccctttggatgctggtgaatactgtgtgcctagaggaaatcgtaggcggttccgcgttaggcagcccatcctgcagtatagatgggatatgatgcataggcttggagaaccacaggcaaggatgagagaagagaatatggaaaggattggggaggaggtgagacagctgatggaaaagctgagggaaaagcagttgagtcatagtctgcgggcagtcagcactgacccccctcaccatgaccatcatgatgagttttgccttatgccctgaatcctgatggtttccctaaagttattacggaaacagacccctgctttcgaatttacatgttcatgatgtgcccttgttgtaaacctttacctgtcacttgtttacgtgggtctcctattaccagcttctaattgaatattgtgtttttgaaccagtctgtaagatttttgttagcagaagaattttacctattgcatggaaagatgctcattatagtgaagttaataaagcacctttaaaaagc

SEQ ID NO: 11405 - protein, 125 aa, Homo sapiens; identical to SEQ ID NO: 1808

SEQ ID NO: 11406 - DNA, 2286 bp, Homo sapiens
tgtcatgccatctcttcctctggccaatgctaggagctgggccctccttggggagaaacctgggtttcctgagtcaagggaccagaagcgggccacattcctgaggcaggagtggaaggcagagggcagaggaggttgaggagacagaaggacaggcctctcagggcactgcccctccttccctccttctccacctcacatcatcctgcctgggtcctcagaggagccctgggtagcccgagatgggtagcattcctcggtcaaggcatcagcacagaggggcacaggagtctgggaccatcagaagagaatgcagtggtcgggagagggggtccccagactctgaaccccatgctgagctggggcttgacccttcacttctcccgggagaaggtctcctgtccccgtggctgctctgtttcccatgcccagctcagactgagctcacacaggtgagaaaggctccagctgcatccagtgggccccagcccaacaggcgcatgttttcctttcttgcctcggtccccagggccagctggggccagtgagggaaagggctgcagcaggggagcccttttcttctctcttcctccctgaactccaccaccacggtagagcatctttcccttccctttgctttgcatcctgtttctccattgtctctcctctcatatgtctcacctgtctctccctcccctaccttcaccccgtttctgccatcattcccctgccttccccttctgcctcctgagcctgcgtcactcacctccctgtcccagcatcctgggccatccctaagagctgacctggtcttggccagggccaggacaggcagactgacggacatccagtgaggtagcagagccctgggctcccaccccatttcctactccctgcagagccttcagtggggacttggacaaaggtgagagagggatggagggaggggaagaaagtcctgaagcctgggctcccaatgctgcccagggctgcagaggcaggaacttcggagtgtaggtggacacactgcactgtgtctctgacgtaggtgtgattgctcccatgaggaggacagctccacagtttcacttaccgttgtccattttgttttgattttcggcagctccatcctggaattgttccccaaattattatgcctggatggccagcagtcacccagagcaactttatgtggtactgaagcccacaagaggttaccaacctgtaaggtgagaagagaggatccagcagggtggtgcatgaggaagggggggtaccatctgtggtcctggggactctttattccagggaagcttctttggatctgagatgttgaagaatctggtcctgcaattcctgcagcagtaagtatccctgggaatctgaggcaagagaaggctaggtcagatgaatttacccaagtacaagtctgcctacagtcagactttcaagactcatttggcacccaggccacagagatagcctgtcctcactggtctccaacaggtattacttgatctatgactctggagatcgacagggtctccttagtgcttaccacgatgaggcctgcttctccctgagcattcccttcaatcctgaggactcagccccgagcagcttctgcaagttcttcaaggatagcaggaatataaaaattctcaaggacccctaccttcggggggagctgctgaagcacacaaaacttgatattgtggactccctcagtgcgttgcctaaaactcagcatgacctcagctccttcctggtggacatgtggtaccagacggaatggatgctctgcttttctgtcaacggggtgttcaaggaagtggaaggacagtctcagggttctgttctcgccttcacccggaccttcattgctacccctggcagcagttccagtctgtgcatcgtgaatgacaagctctttgtgcgggataccagccaccaagggacccagagtgccttgttcaccctagtgcccacagccttctccagctccgtgcctgccttctcccaggagcagcagaaaatgctgccttcgtaacaaccagtgtgactacgtcagagctcctcatgttcttgcatggcccaagatgtatttccctgtgactgaaccaggagatctggctggggctaagaagccgaagcccaactcacagggctgactctcatccttccaaaggggccagttgttctgtgcacttgtccacccctgttacccccaggatctctgttccttttcacaataaagtatggtgtcttgttatgtcaaatccctgc

SEQ ID NO: 11407 - protein, 91 aa, Homo sapiens
MWYQTEWMLCFSVNGVFKEVEGQSQGSVLAFTRTFIATPGSSSSLCIVNDKLFVRDTSHQGTQSALFTLVPTAFSSSVPAFSQEQQKMLPS

SEQ ID NO: 11408 - DNA, 2067 bp, Homo sapiens
agaaacatctccctgggtgttaggctggcagcaaactttggggagtggtaagaacaggaagttaattctgtgactcctaggacactcctctctatgcttggggaaggaacttcctgtaagcaaggcttgaggcttgctctcgccttcgtcagcagccctcctcaatcttctccaaactcccgtccccaggccacacagattctcctcaagagagccctataaggacattggtaaaatgtcactgccttcaggacacactacgggtcacactgatcaagttgttcaaagaagagcaagatgttgggatatttaccaaaggagatttagcagtaggtctgaacctgtcaatcctggcatgcattcttcatcccatcagcagcaagatggagatgcagcaatgcatggtgcccacatggactctccagtaagatacactccctatactatttcaccctataatcggaaaggcagttttcgtaaacaagaccaaacccacgttaacatggagagagagcaaaaacctccagagagaagaatggaggggaacatgccggatgggaccttagggagctggttcaagatcacagttccctttggcataaaatacaatgagaagtggctgctgaatttgattcagaatgaatgcagtgtacccttcgtcccagttgagtttcactatgaaaacatgcatgccagcttctttgtggagaatgccagcatcgcctatgcactgaagaatgtcagtggcaagatttgggatgaggataatgaaaagatatcaatctttgtcaaccctgctggcataccccactttgtgcacagggagctgaagtcagaaaaggtggagcagataaagctggccatgaaccaacagtgtgatgtctcccaggaagctcttgatatccagagactcccattttacccagacatggtgaaccgtgatactaagatggcatcgaatcctagaaagtgcatggctgcctccctggacgtccatgaagagaacatacctacagtgatgtctgcaggggagatggacaagtggaaagggatagagccaggagagaagtgtgcggacagaagcccagtgtgcacgaccttctcggatacctccagcaacataaactccatcctggaattgttccccaaattattatgcctggatggccagcagtcacccagagcaactttatgtggtactgaagcccacaagaggttaccaacctgtaagggaagcttctttggatctgagatgttgaagaatctggtcctgcaattcctgcagcagtattacttgatctatgactctggagatcgacagggtctccttagtgcttaccacgatgaggcctgcttctccctgagcattcccttcaatcctgaggactcagccccgagcagcttctgcaagttcttcaaggatagcaggaatataaaaattctcaaggacccctaccttcggggggagctgctgaagcacacaaaacttgatattgtggactccctcagtgcgttgcctaaaactcagcatgacctcagctccttcctggtggacatgtggtaccagacggaatggatgctctgcttttctgtcaacggggtgttcaaggaagtggaaggacagtctcagggttctgttctcgccttcacccggaccttcattgctacccctggcagcagttccagtctgtgcatcgtgaatgacaagctctttgtgcgggataccagccaccaagggacccagagtgccttgttcaccctagtgcccacagccttctccagctccgtgcctgccttctcccaggagcagcagaaaatgctgccttcgtaacaaccagtgtgactacgtcagagctcctcatgttcttgcatggcccaagatgtatttccctgtgactgaaccaggagatctggctggggctaagaagccgaagcccaactcacagggctgactctcatccttccaaaggggccagttgttctgtgcacttgtccacccctgttacccccaggatctctgttccttttcacaataaagtatggtgtcttgttatgtcaaatccctgc

SEQ ID NO: 11409 - protein, 531 aa, Homo sapiens; identical to SEQ ID NO: 1810

SEQ ID NO: 11410 - DNA, 573 bp, Homo sapiens
attcagtatgatgttggttctgggtttgtcatagatggtacttattattttgagagatcctgaaatgattgaaaaggaagagcacaagctgctgctgaaaaagctgtgatcaaggagaaattaatggactgcttccgttctgagttcagtgccactcaacctgaggttgcagaccagtttgaaggcatacaggtgccctctgtgcctattcagaaattccccactgaagactggcccacagcctgcctctgaagactgctttgcaactcccgctgttcaggccactgaatggggtctcactctgttgcccatcctggagtgtagtagtgcagtttcagctcactgcagccttgaccttatgagctcaaggggtcctcctgcctcagcctcctgagtagttgggattacaggtcacactgatcaagttgttcaaagaagagcaagatgttgggatatttaccaaaggagatttagcagtaggtctgaacctgtcaatcctggcatgcattcttcatcccatcagcagcaagatggagatgcagcaatgcatggtgcccacatggactctccagt

SEQ ID NO: 11411 - protein, 42 aa, Homo sapiens
MDCFRSEFSATQPEVADQFEGIQVPSVPIQKFPTEDWPTACL

SEQ ID NO: 11412 - DNA, 2430 bp, Homo sapiens
atgtacgagggcatcgagtacgagggcattgagttcataaacacctccaacaaggagtgcttctcacaaggagcctctgtggaggataagcccagaagcaaccactcacagtcacctctttctggagctccaaaaagttccagaaccccatatcatggcacacctgatgagggccccatcaaacaggaaaagcacaactattcaatggaacgggatgcttatttttcctaccccaactccataacactgcacaacagaaatggtgtgtacatgacctggggctctggggccttattggagcttcagaaagaggttactgatggtgagtgtgcagggagggacactggaggaagagttaagaattgttcctgggacccagtccctgaaccatccagggtttcccagaccttctcccatctcctctcagtcatcctctctccaggacacggtggacacagctgcccagacccctcaatgactgccgatcctgtctcagacacctcccgcctgccctctgctgctctgtgctcgcccaccggccacgaccaaggcgcactgctgctacctggtgtttcattatatggttttacaccattattttatacctatccggttttttcagagagtattagaatgttctgtactgagattcataaactgggtcgcaagagagagccgtcgtggctcgttccattctcggcggtggtacctgctcccggtggccctgaggacgtgtgggccaggggcggccccgaaattaggaagcggagggggagcagtctgcaggtctgcggggctaagtgtcgcggcggcgcacctcgcgtcaagaatccggaggaggagactgcaaggataggcccaggagtaatggagtccaaagaggaactagcggcaaacaatctcaacggggaaaatgcccaacaagaaaacgaaggaggggagcaggcccccacgcagaatgaagaagaatcccgccatttgggagggggtgaaggccagaagcctggaggaaatatcaggcgggggcgagttaggcgacttgtccctaattttcgatgggccatacctaataggcatattgagcacaatgaagcgagagatgatgtagaaaggtttgtagggcagatgatggaaatcaagagaaagactagggaacagcagatgaggcactatatgcgcttccaaactcctgaacctgacaaccattatgacttttgcctcataccttgaatcctaaaagttttcgctgaggttaatgtgaacactgctttacaagcttgtatttttgtgatttactttttctgtaagccttttggggtttacacttaccagtttctaatggaaattagaattctaattgaatattgttttgtctcagcctaaaagttacggtcagcatggcaattcacctattttaggaaaaatactcttttcataatatgaaatgcataaagcagttcaaaaagcagtctgtattccatcatcttcctttttcattccagtccttatttttgtaagtattacttttcctcctccggctacctggactcaaaatctcagttgtctttgacagtttttttcttgtccctgaccaaaaaagaatgatcatacccagaattcaatgtttgatattttaagaatgtatgttctagtgtttttcagagtgagtctaccatctgtataaaaacaccttgggggcaggcaggggcatttaaaaatgtaggacctatcgtccagactcacagagtggggctccagaatctccatttttaacaaactctcttaagtaattctgatgtgtaccaaaatcagtgccattggtgtgtgtgtacgtaactatatacatatgtgtgtgtgtgtatatatataatgtgtcataaccgtaaacaataaacaatatcaagataaatctgactttgatgggcaagtaattaaaaaagaaaagtatgagaccttaaaataagactgatgattataggagtggtagggacagtggcaaagttattcactgtgcaaagcaaaacatgcctgaaggtcacagcctgaggaactcagaattcatcacccctgtcagcagtttcacatccaggatctcattttattcttagaacaacctataaaatctgtattgttatcccacttttacagatgaggtcactggggcttagagatgttaagtaccaaggctaactcctgctgaatatcttgggggtgggggaatccagcctgggccattttctattggaccttatcatctggagatgcagaatatttgacttttgtaacttgatgacaagctgaggatggtaaaagagactcagcaagaatggggctgtttttctatacactgtttttctacatctcaagtacactttaatttttagaatattgagggataaaaaaagtaagatcctctagtgttgttcaaag

SEQ ID NO: 11413 - protein, 409 aa, Homo sapiens [sequence omitted]

SEQ ID NO: 11414 - DNA, 1274 bp, Homo sapiens
gtgaccggccaacactgagtgttgtctcgctctggcgtcagagccgtcgtggctcgttccattctcggcggtggtacctgctcccggtggccctgaggacgtgtgggccaggggcggccccgaaattaggaagcggagggggagcagtctgcaggtctgcggggctaagtgtcgcggcggcgcacctcgcgtcaagaatccggaggaggagactgcaaggataggcccaggagtaatggagtccaaagaggaactagcggcaaacaatctcaacggggaaaatgcccaacaagaaaacgaaggaggggagcaggcccccacgcagaatgaagaagaatcccgccatttgggagggggtgaaggccagaagcctggaggaaatatcaggcgggggcgagttaggcgacttgtccctaattttcgatgggccatacctaataggcatattgagcacaatgaagcgagagatgatgtagaaaggtttgtagggcagatgatggaaatcaagagaaagactagggaacagcagatgaggcactatatgcgcttccaaactcctgaacctgacaaccattatgacttttgcctcataccttgaatcctaaaagttttcgctgaggttaatgtgaacactgctttacaagcttgtatttttgtgatttactttttctgtaagccttttggggtttacacttaccagtttctaatggaaattagaattctaattgaatattgttttgtctcagcctaaaagttacggtcagcatggcaattcacctattttaggaaaaatactcttttcataatatgaaatgcataaagcagttcaaaaagcagtctgtattccatcatcttcctttttcattccagtccttatttttgtaagtattacttttcctcctccggctacctggactcaaaatctcagttgtctttgacagtttttttcttgtccctgaccaaaaaagaatgatcatacccagaattcaatgtttgatattttaagaatgtatgttctagtgtttttcagagtgagtctaccatctgtataaaaacaccttgggggcaggcaggggcatttaaaaatgtaggacctatcgtccagactcacagagtggggctccagaatctccatttttaacaaactctcttaagtaattctgatgtgtaccaaaatcagtgccattggtgtgtgtgtacgtaactatatacatatgtgtgtgtgtgtatatatataatgtgtcataaccgtaaacaataaacaatatcaagat

SEQ ID NO: 11415 - protein, 120 aa, Homo sapiens
MESKEELAANNLNGENAQQENEGGEQAPTQNEEESRHLGGGEGQKPGGNIRRGRVRRLVPNFRWAIPNRHIEHNEARDDVERFVGQMMEIKRKTREQQMRHYMRFQTPEPDNHYDFCLIP

SEQ ID NO: 11416 - DNA, 1798 bp, Homo sapiens
gtgaccggccaacactgagtgttgtctcgctctggcgtcagagccgtcgtggctcgttccattctcggcggtggtacctgctcccggtggccctgaggacgtgtgggccaggggcggccccgaaattaggaagcggagggggagcagtctgcaggtctgcggggctaagtgtcgcggcggcgcacctcgcgtcaagaatccggaggaggagactgcaaggataggcccaggagtaatggagtccaaagaggaactagcggcaaacaatctcaacggggaaaatgcccaacaagaaaacgaaggaggggagcaggcccccacgcagaatgaagaagaatcccgccatttgggagggggtgaaggccagaagcctggaggaaatatcaggcgggggcgagttaggcgacttgtccctaattttcgatgggccatacctaataggcatattgagcacaatgaagcgagagatgatgtagaaaggtttgtagggcagatgatggaaatcaagagaaagactagggaacagcagatgaggcactatatgcgcttccaaactcctgaacctgacaaccattatgacttttgcctcataccttgaatcctaaaagttttcgctgaggttaatgtgaacactgctttacaagcttgtatttttgtgatttactttttctgtaagccttttggggtttacacttaccagtttctaatggaaattagaattctaattgaatattgttttgtctcagcctaaaagttacggtcagcatggcaattcacctattttaggaaaaatactcttttcataatatgaaatgcataaagcagttcaaaaagcagtctgtattccatcatcttcctttttcattccagtccttatttttgtaagtattacttttcctcctccggctacctggactcaaaatctcagttgtctttgacagtttttttcttgtccctgaccaaaaaagaatgatcatacccagaattcaatgtttgatattttaagaatgtatgttctagtgtttttcagagtgagtctaccatctgtataaaaacaccttgggggcaggcaggggcatttaaaaatgtaggacctatcgtccagactcacagagtggggctccagaatctccatttttaacaaactctcttaagtaattctgatgtgtaccaaaatcagtgccattggtgtgtgtgtacgtaactatatacatatgtgtgtgtgtgtatatatataatgtgtcataaccgtaaacaataaacaatatcaagataaatctgactttgatgggcaagtaattaaaaaagaaaagtatgagaccttaaaataagactgatgattataggagtggtagggacagtggcaaagttattcactgtgcaaagcaaaacatgcctgaaggtcacagcctgaggaactcagaattcatcacccctgtcagcagtttcacatccaggatctcattttattcttagaacaacctataaaatctgtattgttatcccacttttacagatgaggtcactggggcttagagatgttaagtaccaaggctaactcctgctgaatatcttgggggtgggggaatccagcctgggccattttctattggaccttatcatctggagatgcagaatatttgacttttgtaacttgatgacaagctgaggatggtaaaagagactcagcaagaatggggctgtttttctatacactgtttttctacatctcaagtacactttaatttttagaatattgagggataaaaaaagtaagatcctctagtgttgttcaaag

SEQ ID NO: 11417 - protein, 120 aa, Homo sapiens; identical to SEQ ID NO: 11415

SEQ ID NO: 11418 - DNA, 1697 bp, Homo sapiens
gttgtctcgctctggcgtcagagccgtcgtggctcgttccattctcggcggtggtacctgctcccggtggccctgaggacgtgtgggccaggggcggccccgaaattaggaagcggagggggagcaggtaaggaacccggcggggggtccctggggttggtgtgagggagtggctccggcctgcggatgcccaccccgggggagccgtgcggagaagcaatcggtccgcgatgcagcccccgggccccgcggcgggcccgcgagccttccttgagcggagaggtgcccggcccggagggagccggcggtcctggggctacgacccttcggaaacacctgcctacgccatcagcgcaagcttttccgacacccctgccccgcacttcttggtgcagaaaatggtggtcagcttgcggggcggggcggctgaggcggggggcgagggtggcgaggagggccagggccagggccagggccagggcctcggggcggggcgggggaggggccggatggcggtagttcctagctagcgttctgctgcagcagcccccacttcccccaccccggcagtctgcaggtctgcggggctaagtgtcgcggcggcgcacctcgcgtcaagaatccggaggaggagactgcaaggataggcccaggagtaatggagtccaaagaggaactagcggcaaacaatctcaacggggaaaatgcccaacaagaaaacgaaggaggggagcaggcccccacgcagaatgaagaagaatcccgccatttgggagggggtgaaggccagaagcctggaggaaatatcaggcgggggcgagttaggcgacttgtccctaattttcgatgggccatacctaataggcatattgagcacaatgaagcgagagatgatgtagaaaggtttgtagggcagatgatggaaatcaagagaaagactagggaacagcagatgaggcactatatgcgcttccaaactcctgaacctgacaaccattatgacttttgcctcataccttgaatcctaaaagttttcgctgaggttaatgtgaacactgctttacaagcttgtatttttgtgatttactttttctgtaagccttttggggtttacacttaccagtttctaatggaaattagaattctaattgaatattgttttgtctcagcctaaaagttacggtcagcatggcaattcacctattttaggaaaaatactcttttcataatatgaaatgcataaagcagttcaaaaagcagtctgtattccatcatcttcctttttcattccagtccttatttttgtaagtattacttttcctcctccggctacctggactcaaaatctcagttgtctttgacagtttttttcttgtccctgaccaaaaaagaatgatcatacccagaattcaatgtttgatattttaagaatgtatgttctagtgtttttcagagtgagtctaccatctgtataaaaacaccttgggggcaggcaggggcatttaaaaatgtaggacctatcgtccagactcacagagtggggctccagaatctccatttttaacaaactctcttaagtaattctgatgtgtaccaaaatcagtgccattggtgtgtgtgtacgtaactatatacatatgtgtgtgtgtgtatatatataatgtgtcataaccgtaaacaataaacaatatcaagat

SEQ ID NO: 11419 - protein, 120 aa, Homo sapiens; identical to SEQ ID NO: 11415

SEQ ID NO: 11420 - DNA, 2221 bp, Homo sapiens
gttgtctcgctctggcgtcagagccgtcgtggctcgttccattctcggcggtggtacctgctcccggtggccctgaggacgtgtgggccaggggcggccccgaaattaggaagcggagggggagcaggtaaggaacccggcggggggtccctggggttggtgtgagggagtggctccggcctgcggatgcccaccccgggggagccgtgcggagaagcaatcggtccgcgatgcagcccccgggccccgcggcgggcccgcgagccttccttgagcggagaggtgcccggcccggagggagccggcggtcctggggctacgacccttcggaaacacctgcctacgccatcagcgcaagcttttccgacacccctgccccgcacttcttggtgcagaaaatggtggtcagcttgcggggcggggcggctgaggcggggggcgagggtggcgaggagggccagggccagggccagggccagggcctcggggcggggcgggggaggggccggatggcggtagttcctagctagcgttctgctgcagcagcccccacttcccccaccccggcagtctgcaggtctgcggggctaagtgtcgcggcggcgcacctcgcgtcaagaatccggaggaggagactgcaaggataggcccaggagtaatggagtccaaagaggaactagcggcaaacaatctcaacggggaaaatgcccaacaagaaaacgaaggaggggagcaggcccccacgcagaatgaagaagaatcccgccatttgggagggggtgaaggccagaagcctggaggaaatatcaggcgggggcgagttaggcgacttgtccctaattttcgatgggccatacctaataggcatattgagcacaatgaagcgagagatgatgtagaaaggtttgtagggcagatgatggaaatcaagagaaagactagggaacagcagatgaggcactatatgcgcttccaaactcctgaacctgacaaccattatgacttttgcctcataccttgaatcctaaaagttttcgctgaggttaatgtgaacactgctttacaagcttgtatttttgtgatttactttttctgtaagccttttggggtttacacttaccagtttctaatggaaattagaattctaattgaatattgttttgtctcagcctaaaagttacggtcagcatggcaattcacctattttaggaaaaatactcttttcataatatgaaatgcataaagcagttcaaaaagcagtctgtattccatcatcttcctttttcattccagtccttatttttgtaagtattacttttcctcctccggctacctggactcaaaatctcagttgtctttgacagtttttttcttgtccctgaccaaaaaagaatgatcatacccagaattcaatgtttgatattttaagaatgtatgttctagtgtttttcagagtgagtctaccatctgtataaaaacaccttgggggcaggcaggggcatttaaaaatgtaggacctatcgtccagactcacagagtggggctccagaatctccatttttaacaaactctcttaagtaattctgatgtgtaccaaaatcagtgccattggtgtgtgtgtacgtaactatatacatatgtgtgtgtgtgtatatatataatgtgtcataaccgtaaacaataaacaatatcaagataaatctgactttgatgggcaagtaattaaaaaagaaaagtatgagaccttaaaataagactgatgattataggagtggtagggacagtggcaaagttattcactgtgcaaagcaaaacatgcctgaaggtcacagcctgaggaactcagaattcatcacccctgtcagcagtttcacatccaggatctcattttattcttagaacaacctataaaatctgtattgttatcccacttttacagatgaggtcactggggcttagagatgttaagtaccaaggctaactcctgctgaatatcttgggggtgggggaatccagcctgggccattttctattggaccttatcatctggagatgcagaatatttgacttttgtaacttgatgacaagctgaggatggtaaaagagactcagcaagaatggggctgtttttctatacactgtttttctacatctcaagtacactttaatttttagaatattgagggataaaaaaagtaagatcctctagtgttgttcaaag

SEQ ID NO: 11421 - protein, 120 aa, Homo sapiens; identical to SEQ ID NO: 11415

SEQ ID NO: 11422 - DNA, 1168 bp, Homo sapiens
gtctcgctctggcgtcagagccgtcgtggctcgttccattctcggcggtggtacctgctcccggtggccctgaggacgtgtgggccaggggcggccccgaaattaggaagcggagggggagcaggagtaatggagtccaaagaggaactagcggcaaacaatctcaacggggaaaatgcccaacaagaaaacgaaggaggggagcaggcccccacgcagaatgaagaagaatcccgccatttgggagggggtgaaggccagaagcctggaggaaatatcaggcgggggcgagttaggcgacttgtccctaattttcgatgggccatacctaataggcatattgagcacaatgaagcgagagatgatgtagaaaggtttgtagggcagatgatggaaatcaagagaaagactagggaacagcagatgaggcactatatgcgcttccaaactcctgaacctgacaaccattatgacttttgcctcataccttgaatcctaaaagttttcgctgaggttaatgtgaacactgctttacaagcttgtatttttgtgatttactttttctgtaagccttttggggtttacacttaccagtttctaatggaaattagaattctaattgaatattgttttgtctcagcctaaaagttacggtcagcatggcaattcacctattttaggaaaaatactcttttcataatatgaaatgcataaagcagttcaaaaagcagtctgtattccatcatcttcctttttcattccagtccttatttttgtaagtattacttttcctcctccggctacctggactcaaaatctcagttgtctttgacagtttttttcttgtccctgaccaaaaaagaatgatcatacccagaattcaatgtttgatattttaagaatgtatgttctagtgtttttcagagtgagtctaccatctgtataaaaacaccttgggggcaggcaggggcatttaaaaatgtaggacctatcgtccagactcacagagtggggctccagaatctccatttttaacaaactctcttaagtaattctgatgtgtaccaaaatcagtgccattggtgtgtgtgtacgtaactatatacatatgtgtgtgtgtgtatatatataatgtgtcataaccgtaaacaataaacaatatcaagat

SEQ ID NO: 11423 - protein, 120 aa, Homo sapiens; identical to SEQ ID NO: 11415

SEQ ID NO: 11424 - DNA, 1692 bp, Homo sapiens
gtctcgctctggcgtcagagccgtcgtggctcgttccattctcggcggtggtacctgctcccggtggccctgaggacgtgtgggccaggggcggccccgaaattaggaagcggagggggagcaggagtaatggagtccaaagaggaactagcggcaaacaatctcaacggggaaaatgcccaacaagaaaacgaaggaggggagcaggcccccacgcagaatgaagaagaatcccgccatttgggagggggtgaaggccagaagcctggaggaaatatcaggcgggggcgagttaggcgacttgtccctaattttcgatgggccatacctaataggcatattgagcacaatgaagcgagagatgatgtagaaaggtttgtagggcagatgatggaaatcaagagaaagactagggaacagcagatgaggcactatatgcgcttccaaactcctgaacctgacaaccattatgacttttgcctcataccttgaatcctaaaagttttcgctgaggttaatgtgaacactgctttacaagcttgtatttttgtgatttactttttctgtaagccttttggggtttacacttaccagtttctaatggaaattagaattctaattgaatattgttttgtctcagcctaaaagttacggtcagcatggcaattcacctattttaggaaaaatactcttttcataatatgaaatgcataaagcagttcaaaaagcagtctgtattccatcatcttcctttttcattccagtccttatttttgtaagtattacttttcctcctccggctacctggactcaaaatctcagttgtctttgacagtttttttcttgtccctgaccaaaaaagaatgatcatacccagaattcaatgtttgatattttaagaatgtatgttctagtgtttttcagagtgagtctaccatctgtataaaaacaccttgggggcaggcaggggcatttaaaaatgtaggacctatcgtccagactcacagagtggggctccagaatctccatttttaacaaactctcttaagtaattctgatgtgtaccaaaatcagtgccattggtgtgtgtgtacgtaactatatacatatgtgtgtgtgtgtatatatataatgtgtcataaccgtaaacaataaacaatatcaagataaatctgactttgatgggcaagtaattaaaaaagaaaagtatgagaccttaaaataagactgatgattataggagtggtagggacagtggcaaagttattcactgtgcaaagcaaaacatgcctgaaggtcacagcctgaggaactcagaattcatcacccctgtcagcagtttcacatccaggatctcattttattcttagaacaacctataaaatctgtattgttatcccacttttacagatgaggtcactggggcttagagatgttaagtaccaaggctaactcctgctgaatatcttgggggtgggggaatccagcctgggccattttctattggaccttatcatctggagatgcagaatatttgacttttgtaacttgatgacaagctgaggatggtaaaagagactcagcaagaatggggctgtttttctatacactgtttttctacatctcaagtacactttaatttttagaatattgagggataaaaaaagtaagatcctctagtgttgttcaaag

SEQ ID NO: 11425 - protein, 120 aa, Homo sapiens; identical to SEQ ID NO: 11415

SEQ ID NO: 11426 - DNA, 587 bp, Homo sapiens
ggcgtcagagccgtcgtggctcgttccattctcggcggtggtacctgctcccggtggccctgaggacgtgtgggccaggggcggccccgaaattaggaagcggagggggagcagtctgcaggtctgcggggctaagtgtcgcggcggcgcacctcgcgtcaagaatccggaggaggagactgcaaggataggcccaggagtaatggagtccaaagaggaactagcggcaaacaatctcaacttgtctttgacagtttttttcttgtccctgaccaaaaaagaatgatcatacccagaattcaatgtttgatattttaagaatgtatgttctagtgtttttcagagtgagtctaccatctgtataaaaacaccttgggggcaggcaggggcatttaaaaatgtaggacctatcgtccagactcacagagtggggctccagaatctccatttttaacaaactctcttaagtaattctgatgtgtaccaaaatcagtgccattggtgtgtgtgtacgtaactatatacatatgtgtgtgtgtgtatatatataatgtgtcataaccgtaaacaataaacaatatcaagat

SEQ ID NO: 11427 - protein, 62 aa, Homo sapiens
RQSRRGSFHSRRWYLLPVALRTCGPGAAPKLGSGGGAVCRSAGLSVAAAHLASRIRRRRLQG

SEQ ID NO: 11428 - DNA, 1111 bp, Homo sapiens
ggcgtcagagccgtcgtggctcgttccattctcggcggtggtacctgctcccggtggccctgaggacgtgtgggccaggggcggccccgaaattaggaagcggagggggagcagtctgcaggtctgcggggctaagtgtcgcggcggcgcacctcgcgtcaagaatccggaggaggagactgcaaggataggcccaggagtaatggagtccaaagaggaactagcggcaaacaatctcaacttgtctttgacagtttttttcttgtccctgaccaaaaaagaatgatcatacccagaattcaatgtttgatattttaagaatgtatgttctagtgtttttcagagtgagtctaccatctgtataaaaacaccttgggggcaggcaggggcatttaaaaatgtaggacctatcgtccagactcacagagtggggctccagaatctccatttttaacaaactctcttaagtaattctgatgtgtaccaaaatcagtgccattggtgtgtgtgtacgtaactatatacatatgtgtgtgtgtgtatatatataatgtgtcataaccgtaaacaataaacaatatcaagataaatctgactttgatgggcaagtaattaaaaaagaaaagtatgagaccttaaaataagactgatgattataggagtggtagggacagtggcaaagttattcactgtgcaaagcaaaacatgcctgaaggtcacagcctgaggaactcagaattcatcacccctgtcagcagtttcacatccaggatctcattttattcttagaacaacctataaaatctgtattgttatcccacttttacagatgaggtcactggggcttagagatgttaagtaccaaggctaactcctgctgaatatcttgggggtgggggaatccagcctgggccattttctattggaccttatcatctggagatgcagaatatttgacttttgtaacttgatgacaagctgaggatggtaaaagagactcagcaagaatggggctgtttttctatacactgtttttctacatctcaagtacactttaatttttagaatattgagggataaaaaaagtaagatcctctagtgttgttcaaag

SEQ ID NO: 11429 - protein, 62 aa, Homo sapiens; identical to SEQ ID NO: 11427

SEQ ID NO: 11430 - DNA, 1233 bp, Homo sapiens
agccgtcgtggctcgttccattctcggcggtggtacctgctcccggtggccctgaggacgtgtgggccaggggcggccccgaaattaggaagcggagggggagcagtctgcaggtctgcggggctaagtgtcgcggcggcgcacctcgcgtcaagaatccggaggaggagactgcaaggataggcccaggagtaatggagtccaaagaggaactagcggcaaacaatctcaacggggaaaatgcccaacaagaaaacgaaggaggggagcaggcccccacgcagaatgaagaagaatcccgccatttgggagggggtgaaggccagaagcctggaggaaatatcaggcgggggcgagttaggcgacttgtccctaattttcgatgggccatacctaataggcatattgagcacaatgaagcgagagatgatgtagaaaggtttgtagggcagatgatggaaatcaagagaaagactagggaacagcagatgaggcactatatgcgcttccaaactcctgaacctgacaaccattatgacttttgcctcataccttgaatcctaaaagttttcgctgaggttaatgtgaacactgctttacaagcttgtatttttgtgatttactttttctgtaagccttttggggtttacacttaccagtttctaatggaaattagaattctaattgaatattgttttgtctcagcctaaaagttacggtcagcatggcaattcacctattttaggaaaaatactcttttcataatatgaaatgcataaagcagttcaaaaagcagtctgtattccatcatcttcctttttcattccagtccttatttttgtaagtattacttttcctcctccggctacctggactcaaaatctcagttgtctttgacagtttttttcttgtccctgaccaaaaaagaatgatcatacccagaattcaatgtttgatattttaagaatgtatgttctagtgtttttcagagtgagtctaccatctgtataaaaacaccttgggggcaggcaggggcatttaaaaatgtaggacctatcgtccagactcacagagtggggctccagaatctccatttttaacaaactctcttaagtaattctgatgtgtaccaaaatcagtgccattggtgtgtgtgtacgtaactatatacatatgtgtgtgtgtgtatatatataatgtgtcataaccgtaaacaataaacaatatcaagat

SEQ ID NO: 11431 - protein, 120 aa, Homo sapiens; identical to SEQ ID NO: 11415

SEQ ID NO: 11432 - DNA, 401 bp, Homo sapiens
ccttccttttggactaatggctgagtgacccaactggatttccttggcttgaacctgagcaagccctctctctctaaagacttgaatgcctactcccttcactgagtggtttcttctgttcctggccaactcagatgcaatccctagtgagcctgatgatcaaacttctgagcgatcagattcctgaaagagcagtctctccatgacaaaagatggatttggaaatgagaaagcaatttctgtaaaacttctgcacctgtggtagactcagaaacacacacaaggctataaatgtctttatgcacttattaattttccaataaacatactcaacagtacacctaatagggaagttctgtgattaatttttcaaacaataagaaaataaatgatcagaaagg

SEQ ID NO: 11433 - protein, 33 aa, Homo sapiens
MPTPFTEWFLLFLANSDAIPSEPDDQTSERSDS

SEQ ID NO: 11434 - DNA, 337 bp, Homo sapiens
ccttccttttggactaatggctgagtgacccaactggatttccttggcttgaacctgagcaagccctctctctctaaagacttgaatgcctactcccttcactgagtggtttcttctgttcctggccaactcagatgcaatccctagtgagcctgatgatcaaacttctgagcgatcagattcctgaaagagcagtctctccatgacaaaagatggatttggaaatgagaaagcaatttctgtaaaacttctgcacctgtggtagactcagaaacacacacaaggctataaatgtctttatgcacttattaattttccaataaacatactcaacagt

SEQ ID NO: 11435 - protein, 33 aa, Homo sapiens; identical to SEQ ID NO: 11433

SEQ ID NO: 11436 - DNA, 519 bp, Homo sapiens
gggttgtgtgtgtcttgaagggggattgccgcgtaagtgtatgggtgcggtgtgtgagagtacagggttgtctaaaagaacccaagtgaccgtgtgtgtggttgggggcggggacgagtgggacgttgggctgggactgagagaagaaaggaagtaggggccgcgaccccggcaggggttcccgctggtctgatcttcaccgtgggggttcgcctgcccgcccacctctgtgtcggcaaggcccgctggggcagggtgtgaatgtacctggctgcttaaaggaaagaagaggagggcaccgcacgtgattggccagatgcaatccctagtgagcctgatgatcaaacttctgagcgatcagattcctgaaagagcagtctctccatgacaaaagatggatttggaaatgagaaagcaatttctgtaaaacttctgcacctgtggtagactcagaaacacacacaaggctataaatgtctttatgcacttattaattttccaataaacatactcaacagt

SEQ ID NO: 11437 - protein, 38 aa, Homo sapiens [sequence omitted]

SEQ ID NO: 11438 - DNA, 294 bp, Homo sapiens
agacacacagctcctgtcctgggaagctgattctgagggcgggaccctgcccctaccccagggagcccagagtctgaggggagacgccatctcagccctgccctgttccttccttttggactaatggctgagtgacccaactggatttccttggcttgaacctgagcaagccctctctctctaaagacttgaatgcctactcccttcactgagtggtttcttctgttcctggccaactcagtgagaaagcaatcatctgcaagccgggaagagagccctcatcagaactcaacc

SEQ ID NO: 11439 - protein, 33 aa, Homo sapiens
MPTPFTEWFLLFLANSVRKQSSASREESPHQNS

SEQ ID NO: 11440 - DNA, 3088 bp, Homo sapiens
atgctcgaggtgtccggtgaccgaaacactcttagctgggtgcagggtgcggctcagggcgtggtcaccgggggctacttagggccgccggtgcgggggacgacgcaaaggttaactgcgagctgccgggcactcagcgcgggtcatggcgtggatactggactgccttttcgcctcggcctttgagccccgcccccgccgtgcaaaaacaaccagaggctgctctgcttgagggtgaagccgcctcccagttttccctccccctctacccccacccccatagttctctccaccaggtccagtgacaattggatgatgcagccttgataatcatccgattccagaatgggtggctgcattccttttctgaaggcagcaagggcactgtgccccagaatcatgccccctttgctgttgttgtccgccttcatttttttagtgagtgtcttgggaggagccccaggacacaaccccgaccgcaggacgaagatggtatcgatacacagcctctctgagctggagcgtctgaagctgcaagagactgcttaccacgaactcgtggccagacatttcctctccgaattcaaacctgacagagctctgcctattgaccgtccgaacaccttggataagtggtttctgattttgagaggacagcagagggctgtatcacacaagacatttggcattagcctggaagaggtcctggtgaacgagtttacccgccgcaagcatcttgaactgacagccacgatgcaggttgaagaagccaccggtcaggctgcgggccgtcgtcggggaaacgtggtgcgaagggtgtttggccgcatccggcgctttttcagtcgcaggcggaatgagcccaccttgccccgggagttcactcgccgtgggcgtcgaggtgcagtgtctgtggatagtctggctgagctggaagacggagccctgctgctgcagaccctgcagctttcaaaaatttcctttccaattggccaacgacttctgggatccaaaaggaagatgagtctcaatccgattgcgaaacaaatcccccaggttgttgaggcttgctgccaattcattgaaaaacatggcttaagcgcagtggggatttttacccttgaatactccgtgcagcgagtgcgtcagctccgtgaagaatttgatcaaggtctggatgtagtgctggatgacaatcagaatgtgcatgatgtggctgcactcctcaaggagtttttccgtgacatgaaggattctctgctgccagatgatctgtacatgtcattcctcctgacagcaactttaaagccccaggatcagctttctgccctgcagttgctggtctacctgatgccaccctgccacagtgataccctggagcgtctgctgaaggccctgcataaaatcactgagaactgcgaggactcaattggcattgatggacagttggtcccaggcaaccgtatgacttccactaacttggccttggtgtttggatctgctctcctgaaaaaaggaaagtttggcaagagagagtccaggaaaacaaagctggggattgatcactatgttgcttctgtcaatgtggtccgtgccatgattgataactgggatgtcctcttccaggtgcctccccatattcagaggcaggttgctaagcgcgtgtggaagtccagcccggaagcacttgattttatcagacgcaggaacttgaggaagatccagagtgcacgcataaagatggaagaggatgcactactttctgatccagtggaaacctctgctgaagcccgggctgctgtccttgctcaaagcaagccttctgatgaaggttcctctgaggagccagctgtgccttccggcactgcccgttcccatgacgatgaggaaggagcgggtaaccctcccattccggagcaagaccgcccattgctccgtgtgccccgggagaaggaggccaaaactggcgtcagctacttctttccttagatgtttttccttctataaggtgccagacaggggaaaagggtgggggtacatctgggatgtcacaggaaacattaaggagagagttgaaggtaaagatctgaaggtaagaaggagttccacctgatgctcgggtcaggatgagaattccaaacacactgccagccccttcactggggatgcttggtctcttctgctggtaaaagcagagatgtttctgtgtcatgcccaagctccccggtgctaccttgcctttctcttttacccctgatcttggctttctctctctctctgcagactttcctttaattgatgtgacatttgtggtaaacacctttcccagggaacctcacaaatcttgagatgctttcccttccccagatgggattgcatgatttccctgactttcctaccctcctccagagagctcagttggaaaggccctcaagaggcatgctagaacgttaggtcagcctactgacagctgacaaacaattaatgcgaaatcatgtcacaccaacccatagccgtgtccacgcagcaactccaccaccttaggatttccccctccaaattattcagaccaatggcttgccaaatggcctctcccaaaattctgtacagttttgctcaggtcacgccaacagggaaacctcaagtgtaggtctaattagtgtttctgggatccaaagttagaggaaaatttagattttattgcctggatctgctttaaagacaattggtgtttacaccctcttgtcagcaaaacagctagttaggtaaggacatatagttccaagtaggtaaagtcacttgattacaaatgttcttaactatcgtctctgtaattcctttatacaggacagtacaaaattgtgggacatgctctggtaacacacagatatgggttgcatatgatccagaattacagctgatattatggatgacaactgctaaggtccataaaatgaagactgtattgtattgagggatagaaattgatcatttaatgggtaacaactgctgagctcaaagatttgtgattgttaaaacttctctggcatttaatcattaataaacatctgtattgtgacagcagcat

SEQ ID NO: 11441 - protein, 547 aa, Homo sapiens; identical to SEQ ID NO: 1812

SEQ ID NO: 11442 - DNA, 2689 bp, Homo sapiens
gtattgtatgctactggcaccttgagaaggttgaaagcaatgagtgtcttgggaggagccccaggacacaaccccgaccgcaggacgaagatggtatcgatacacagcctctctgagctggagcgtctgaagctgcaagagactgcttaccacgaactcgtggccagacatttcctctccgaattcaaacctgacagagctctgcctattgaccgtccgaacaccttggataagtggtttctgattttgagaggacagcagagggctgtatcacacaagacatttggcattagcctggaagaggtcctggtgaacgagtttacccgccgcaagcatcttgaactgacagccacgatgcaggttgaagaagccaccggtcaggctgcgggccgtcgtcggggaaacgtggtgcgaagggtgtttggccgcatccggcgctttttcagtcgcaggcggaatgagcccaccttgccccgggagttcactcgccgtgggcgtcgaggtgcagtgtctgtggatagtctggctgagctggaagacggagccctgctgctgcagaccctgcagctttcaaaaatttcctttccaattggccaacgacttctgggatccaaaaggaagatgagtctcaatccgattgcgaaacaaatcccccaggttgttgaggcttgctgccaattcattgaaaaacatggcttaagcgcagtggggatttttacccttgaatactccgtgcagcgagtgcgtcagctccgtgaagaatttgatcaaggtctggatgtagtgctggatgacaatcagaatgtgcatgatgtggctgcactcctcaaggagtttttccgtgacatgaaggattctctgctgccagatgatctgtacatgtcattcctcctgacagcaactttaaagccccaggatcagctttctgccctgcagttgctggtctacctgatgccaccctgccacagtgataccctggagcgtctgctgaaggccctgcataaaatcactgagaactgcgaggactcaattggcattgatggacagttggtcccaggcaaccgtatgacttccactaacttggccttggtgtttggatctgctctcctgaaaaaaggaaagtttggcaagagagagtccaggaaaacaaagctggggattgatcactatgttgcttctgtcaatgtggtccgtgccatgattgataactgggatgtcctcttccaggtgcctccccatattcagaggcaggttgctaagcgcgtgtggaagtccagcccggaagcacttgattttatcagacgcaggaacttgaggaagatccagagtgcacgcataaagatggaagaggatgcactactttctgatccagtggaaacctctgctgaagcccgggctgctgtccttgctcaaagcaagccttctgatgaaggttcctctgaggagccagctgtgccttccggcactgcccgttcccatgacgatgaggaaggagcgggtaaccctcccattccggagcaagaccgcccattgctccgtgtgccccgggagaaggaggccaaaactggcgtcagctacttctttccttagatgtttttccttctataaggtgccagacaggggaaaagggtgggggtacatctgggatgtcacaggaaacattaaggagagagttgaaggtaaagatctgaaggtaagaaggagttccacctgatgctcgggtcaggatgagaattccaaacacactgccagccccttcactggggatgcttggtctcttctgctggtaaaagcagagatgtttctgtgtcatgcccaagctccccggtgctaccttgcctttctcttttacccctgatcttggctttctctctctctctgcagactttcctttaattgatgtgacatttgtggtaaacacctttcccagggaacctcacaaatcttgagatgctttcccttccccagatgggattgcatgatttccctgactttcctaccctcctccagagagctcagttggaaaggccctcaagaggcatgctagaacgttaggtcagcctactgacagctgacaaacaattaatgcgaaatcatgtcacaccaacccatagccgtgtccacgcagcaactccaccaccttaggatttccccctccaaattattcagaccaatggcttgccaaatggcctctcccaaaattctgtacagttttgctcaggtcacgccaacagggaaacctcaagtgtaggtctaattagtgtttctgggatccaaagttagaggaaaatttagattttattgcctggatctgctttaaagacaattggtgtttacaccctcttgtcagcaaaacagctagttaggtaaggacatatagttccaagtaggtaaagtcacttgattacaaatgttcttaactatcgtctctgtaattcctttatacaggacagtacaaaattgtgggacatgctctggtaacacacagatatgggttgcatatgatccagaattacagctgatattatggatgacaactgctaaggtccataaaatgaagactgtattgtattgagggatagaaattgatcatttaatgggtaacaactgctgagctcaaagatttgtgattgttaaaacttctctggcatttaatcattaataaacatctgtattgtgacagcagcat

SEQ ID NO: 11443 - protein, 516 aa, Homo sapiens
MSVLGGAPGHNPDRRTKMVSIHSLSELERLKLQETAYHELVARHFLSEFKPDRALPIDRPNTLDKWFLILRGQQRAVSHKTFGISLEEVLVNEFTRRKHLELTATMQVEEATGQAAGRRRGNVVRRVFGRIRRFFSRRRNEPTLPREFTRRGRRGAVSVDSLAELEDGALLLQTLQLSKISFPIGQRLLGSKRKMSLNPIAKQIPQVVEACCQFIEKHGLSAVGIFTLEYSVQRVRQLREEFDQGLDVVLDDNQNVHDVAALLKEFFRDMKDSLLPDDLYMSFLLTATLKPQDQLSALQLLVYLMPPCHSDTLERLLKALHKITENCEDSIGIDGQLVPGNRMTSTNLALVFGSALLKKGKFGKRESRKTKLGIDHYVASVNVVRAMIDNWDVLFQVPPHIQRQVAKRVWKSSPEALDFIRRRNLRKIQSARIKMEEDALLSDPVETSAEARAAVLAQSKPSDEGSSEEPAVPSGTARSHDDEEGAGNPPIPEQDRPLLRVPREKEAKTGVSYFFP

SEQ ID NO: 11444 - DNA, 2927 bp, Homo sapiens
gacacgtggtgccttcaggctctggggcctaggacctttgtggtagcagagtcactgcagagaaccagacaataccaggttgcttataaaaggatgccatgtgcttgctggaggtcccaggtgcaaccaaattgcttgcagctaggaggaccttgaagagaaatgggatcagcccgccaaaccaagaagggttagcacttttgctaggagagctgaccacgcacaaacagatgagaaccaaaaccgagtgaagaggattgaagatgaacccacattttaaaagttcttgtctgctggaggtggcattacctgtgacctcgcttcacttctccatacatggctgttatagcagaaaatccagctttctgaagcatatttcacgacatatgatgagacttatgtgatgtgagacctgagaaaactatgatagaaagaagcaactcaagttgcaaggatattcctcatgtatcatgcaaggatattcctcatatatcatgctttttctatcttctgctctttgccacctgtgaggtccctgaaaatgaaggccaatactacccagatttgaatattctaagagatttctcaaaaagctgatattcataatttgagaagcaatcaagaacaaacgtgtactgaaacagttggtgcaaaatccttattgaccacagatggaattcagtaatttatatttcttcgaaacatagaaaaacggaatactgagatctggtggggggccggcggcagtctgggagcggcgcgccatgtacaccatcatcaacgggcccagcaagttggtcgcgcagcgccgcacaggtctcacgcagcagcaggtgaagggccagctccaggagctcctgaaaagccggcagcccgcgccgccgaccttgcagccccagcgggcgcagcccttcgcgcagccgctgggaccctggcccctgtcgagtgcagggccaaggcttgtgttcaatcgtgtgaatcgccggcgggacccctccaagtccccatccctccaggggacccaggagacctacacactggcccacaaggagaatgtccgctttgtgtccgaagcctggcagcagagactaaggtgtcagtatgttcttcaagctgctctgctcctgggcccaagctattctcctgcctcagccttccaagaagctgaaactacaagaacacaagactgtacctggcttgcaaacaccattgctaataagaagatattacatggatccctgaggtcggtccccaatacgacaagacaatttgatatcataatagaacactgcagaaacaatgctgagtgaagaagagtagaaatgggaagacttggttgagcggaaactgagttcttgaaaagaggagatgcttgatgagggcatggatccctgaggtctgccccagtactataagacaatttgatgtaagaaaacacagcagatataatactgagtgaagaagagtataaatgagaagattggttgtgcagatactgagttcatgaaaagaggagatgattgatgaggccaggtgcggtgactcatgcctgtaatccctgcactttgggaggctgcggcgggcggatcacctgaggtcaggagttcgagaccagcctgggagacagagcatggaaacctaaggtctgtacccaaaactacaggactatttgacatcataataaaacactgcagatatgatgctgagtaagagtagaaatgggaagacttggttgtgcagtaactgagttcttgaaaagaggagatgcttgatgagggcatggatcactaaggtctgttcccaatacaagaagactctttgacatcataataaaatactgcagatacgatgctgagtgaaaaagagtagaaatgggaagacttggttgtgcagaaactgagttcttaaagagaggagatactttatgagggctggagtgcactggagcaatcctggctggccaatactgagttcttgaaaacaggagatgcttgatgaggatgggatcatctagttgcaggaaaacaaggctcagggtgcctactgattctacattatgcttggtccggagagctgccttggactctccaatgcagctgcctctgttaccttgactcgtctcagatttcattgacccaagatgggtcctggcactaggaatgtaagactgtctccattcttttggcttgttccagagaagcccatgcaaggttcctactgaccatatgtttctttcttttcttttgttttttgagacggagtttcgctgttgttgcccaggctggagtgcaatggcgcgatctccgctcactgcaacatccgcctcccggactcaagcgattctcctgcctcagcctcccgagtagctgggattacaggcatgcgccaccacgcccggctaattttgtatttctagtagagttagagtttctccatattggtcaggctggtttcgaactcctggcctcaggtgatctgccctccttggcctcccaaagcgctgggattataggcgtgagccaccgcccccggccttgaccatatgttttatttctagctttgatgtctgggcatcgatttccctcggttaaactatttgctcaatgttaaggccactctgtagaaatttgtctgtgtaactgaggtgctatgcaggcctgcctgtgtgactgtcatgcaggcctgtctgtgtgattgtcagggagaattggtctgccacaatccttttctaagcatagccaatagaggtagttaggcataatttgtatattacagaaattgccttacagagagtaacacatttctatactctccttccataacagacacttaaaaaaacaaaaaaagtaatgtatgcttgctgtggacctcatttaagattgcaacagaagcacttttcaatactattaaacagctttttactttcc

SEQ ID NO: 11445 - protein, 181 aa, Homo sapiens
MYTIINGPSKLVAQRRTGLTQQQVKGQLQELLKSRQPAPPTLQPQRAQPFAQPLGPWPLSSAGPRLVFNRVNRRRDPSKSPSLQGTQETYTLAHKENVRFVSEAWQQRLRCQYVLQAALLLGPSYSPASAFQEAETTRTQDCTWLANTIANKKILHGSLRSVPNTTRQFDIIIEHCRNNAE

SEQ ID NO: 11446 - DNA, 4832 bp, Homo sapiens
taacttaaacccccgaaactccaccttccgggcgcgcggcgcggagccgggcggtgggaatggagcgagcagattgaggccgccactgcagcgccgccagcatgaacttggccgcgagctgaagcggccggcggcgggcgggcgcgggggcaccggccgctagccagggggtgatctgcaacagggctgggttccttggcggccgcctgagtccaggctgcccgcgccggcggccgcccgcccctcggacactgcccccgccgccgccggagctctgcagcacgccctgtgtctaggtcgtttgggaaacgccttggagagtcaagaataaatttgcaggtcaaacaatggatgactggaaaagtcggcttgtaatcaagagcatgcttccccatttcgccatggtgggaaatcgtcaggagcccagaaagctccaggaatcgggaaagaagccctcgtggatggaggaagaagatttatcttttctctacaagagcagcccaggaagaaagcatcagggaactgttaagaggagacaagaagaagaccacttccagtttccagacatggctgatgggggctaccctaataaaattaagaggccttgccttgaagatgtcacccttgcaatgggcccaggtgctcatcctagtactgcttgtgcagaactgcaggtccctccattgacaataaatcctagccctgcggctatgggagtggctggccagtcattactgctggagaataaccctatgaatggcaacatcatgggctcaccatttgtagtaccacagactacagaagtgggactgaaagggcccactgttccttactatgagaaaatcaacagcgtgccggctgtagaccaggagcttcaagagctgctagaggagctcaccaaaattcaagacccttctccaaatgagctagatcttgagaagatactggggacgaagccagaagagccactggttttagatcatccccaggcaaccctaagcacaactcccaagccttcggttcagatgtcacacttggagagcctggcttccagcaaggagtttgcttctagttgcagccaagttactggcatgtcacttcagatcccatcctcctccacagggatcagctattcgattccttccaccagtaagcagatagtgtcaccgagttcttcaatggcacagtccaagagccaggtccaggccatgctccctgtcgctctgccccccttaccagtgcctcagtggcatcacgcccaccagctgaaggcgttggcagccagcaagcaggggtctgctacaaagcagcaagggcccacccccagttggtctggtctgcctcctccaggactctctccaccttaccgcccagtgccatcaccacacccaccaccgctgccactgccaccaccaccacccccattcagcccccagagcctcatggtgtcctgcatgtcgtccaataccttgtcgggtagcactctccgaggctctcccaatgccttactgtcaagcatgacgtccagcagcaatgctgccctggggcccgccatgccctatgctcctgagaagctccccagccctgctctcactcaacagccgcagttcggccctcagagctccattcttgccaacctcatgtcctctaccatcaaaacccctcaaggacacctgatgtctgctctgcctgccagcaaccctgggccgtccccaccctatcgcccagagaagctctctagcccaggcttgccacagcagtccttcaccccacagtgttccctgatccgaagcctcactcccaccagtaatcttctaagccagcaacagcagcagcagcagcagcagcagcaagcaaatgtgatctttaagcccataagcagcaactcatccaaaaccctgagcatgatcatgcagcaggggatggcaagctccagcccaggagccacggagccatttacttttggcaacaccaagcccttgtcccattttgtttctgagccgggtccccagaagatgccctccatgcctaccacctctaggcagccttccctgctccactacctgcagcagccgacaccaacgcaggcctcctcagccactgcctcctccacggccactgccaccttgcagctgcagcagcagcagcagcaacagcagcagcagcctgaccattcttcattccttctgcagcagatgatgcagcaaccccagcgttttcagcgatcagtggcctcagattccatgcctgctctgcccagacagggctgttgccatctgtttgcatggacttctgcagctagctcggtgaagccccagcatcaacacgggaactctttcactagcaggcaagatcctcagcctggagacgtgtcaccgtctaacattactcatgtagacaaagcctgcaagcttggggaagccaggcacccccaggtcagcctcgggcgacagcccccgtcctgccaggccctggggagtgagtccttcctgcccggcagctcctttgctcatgagctggcccgagtcacctcctcgtacagcacctcagaggcagcgccctggggcagcagcaagaggaacagagatcaggtcttatggcaatgacccctgaacggcagaatgcatatatctcccaacagatgagtccatttgaagccgtccaagaacaagtcacctccaagtgtagccggatcaaggcaagccccccatctagcaagcacttgatgccacccagaactgggcttcttcagaacaatctgagtccaggaatgatcccactcaccaggcaccagagctgcgagggcatgggagtgatctcaccaactctggggaagcggcaaggaattttcacctccagcccccagtgtcccatcctctcacactcaggccagactcccctgggcagacttgactctgtctgccagcatatgcagagccccaaggccaccccaccagaagtgcccctgcctgggttctgtcccagctccctgggcacccagtccttgagtccccaccagctcagacggcctagtgtgccaagaatgcccactgcgttcaacaatgctgcatgggtcacagcggcagcagctgtgaccacagcagtttcggggaaaacacccctcagccaagtggataatagcgttcagcagcactcaccttctggccaggcctgccttcagaggccatctgattgggaggcacaagtgcccgctgcgatgggaacacaagtgcccctggccaacaaccccagcttcagcctgctgggcagccagagcctcaggcagagcccggtacagggcccggtgcctgtagcaaacaccaccaagttcctccagcagggtatggccagctttagtcccctgagccccatacagggcatcgagccaccaagctatgtggctgctgctgccaccgctgctgctgcttctgccgttgctgccagccagttcccaggtccgttcgacagaacggatattccccctgagctgccacctgccgactttttgcgccagccccaacccccactaaatgatctgatttcgtcacctgactgcaatgaggtagatttcattgaagctctcttgaaaggctcctgtgtgagcccagatgaagactgggtgtgcaacttgaggctgatcgacgacattttggaacagcatgctgctgctcaaaatgccacagcccagaattctgggcaagtcacccaggatgctggggcactttaaatctgagcaggatgcccatagaaacccccatggtgacatcactctaggaagtggtgtcgatccatacccgcagttgtctcccgttacaatttgagtggtgttgtcagcccatgcttatccctctctctacctgtgacaaaatggaaagctggtgatttttcaagctacgtgtacatatttgaaaattttgtaaatggttttcctaaacattaatgacagaagtatttatacttcattttgtgactttgtaaataaagcgacggcttttgtttcagtagagttgtgtttactatgcattgttttgtgtttattatacaatgttacaaatatgcagaccgtgttgtttgctccagtgataccttgttaagctaggtggctgagtcgcttatggttttaatgcaatgagcaatgtggatatgaccaagagttgttgtgcaagttgacaaatgccaaatagaaaaccacttggccatttatttctatgttcactaaaaatcctattgccttgtgtgattcttaatctcttttgcgaacctttcagtctccgctagctctttcctaatgagctttacagcagaagctgttttatcgttaagtgccccacagagacactttaccaggaggctgggagagttctccagatttgggagaggcgcagagacagtgtgtgagccgagccctgtctcagcaatccacctggaggagctagagtatcctcctccctttaccattcagaccgagagaaaaagcccagcttgtgtgcaccctcgtggggttaaggcgagctgttcctggtttaaagcctttcagtatttgttttgatgtaaggctctgtggtttgggggggaacatctgtaaacattattagttgatttggggtttgtctttgatggtttctatctgcaattatcgtcatgtatatttaagtgtctgttatagaaaacccacacccactgtcctgtaaacttttctcagtgtccagactttctgtaatcacattttaattgccacctcgtatttcacctctacatttgaaatctggcgtctgtttcaagccagtgtgttttttcttcgttctgtaataaacagccaggagaaaagtgcc

SEQ ID NO: 11447 - protein, 752 aa, Homo sapiens
MDDWKSRLVIKSMLPHFAMVGNRQEPRKLQESGKKPSWMEEEDLSFLYKSSPGRKHQGTVKRRQEEDHFQFPDMADGGYPNKIKRPCLEDVTLAMGPGAHPSTACAELQVPPLTINPSPAAMGVAGQSLLLENNPMNGNIMGSPFVVPQTTEVGLKGPTVPYYEKINSVPAVDQELQELLEELTKIQDPSPNELDLEKILGTKPEEPLVLDHPQATLSTTPKPSVQMSHLESLASSKEFASSCSQVTGMSLQIPSSSTGISYSIPSTSKQIVSPSSSMAQSKSQVQAMLPVALPPLPVPQWHHAHQLKALAASKQGSATKQQGPTPSWSGLPPPGLSPPYRPVPSPHPPPLPLPPPPPPFSPQSLMVSCMSSNTLSGSTLRGSPNALLSSMTSSSNAALGPAMPYAPEKLPSPALTQQPQFGPQSSILANLMSSTIKTPQGHLMSALPASNPGPSPPYRPEKLSSPGLPQQSFTPQCSLIRSLTPTSNLLSQQQQQQQQQQQANVIFKPISSNSSKTLSMIMQQGMASSSPGATEPFTFGNTKPLSHFVSEPGPQKMPSMPTTSRQPSLLHYLQQPTPTQASSATASSTATATLQLQQQQQQQQQQPDHSSFLLQQMMQQPQRFQRSVASDSMPALPRQGCCHLFAWTSAASSVKPQHQHGNSFTSRQDPQPGDVSPSNITHVDKACKLGEARHPQVSLGRQPPSCQALGSESFLPGSSFAHELARVTSSYSTSEAAPWGSSKRNRDQVLWQ

SEQ ID NO: 11448 - DNA, 2211 bp, Homo sapiens
accttccgggcgcgcggcgcggagccgggcggtgggaatggagcgagcagattgaggccccagcaagcaggggtctgctacaaagcagcaagggcccacccccagttggtctggtctgcctcctccaggactctctccaccttaccgcccagatcccactcaccaggcaccagagctgcgagggcatgggagtgatctcaccaactctggggaagcggcaaggaattttcacctccagcccccagtgtcccatcctctcacactcaggccagactcccctgggcagacttgactctgtctgccagcatatgcagagccccaaggccaccccaccagaagtgcccctgcctgggttctgtcccagctccctgggcacccagtccttgagtccccaccagctcagacggcctagtgtgccaagaatgcccactgcgttcaacaatgctgcatgggtcacagcggcagcagctgtgaccacagcagtttcggggaaaacacccctcagccaagtggataatagcgttcagcagcactcaccttctggccaggcctgccttcagaggccatctgattgggaggcacaagtgcccgctgcgatgggaacacaagtgcccctggccaacaaccccagcttcagcctgctgggcagccagagcctcaggcagagcccggtacagggcccggtgcctgtagcaaacaccaccaagttcctccagcagggtatggccagctttagtcccctgagccccatacagggcatcgagccaccaagctatgtggctgctgctgccaccgctgctgctgcttctgccgttgctgccagccagttcccaggtccgttcgacagaacggatattccccctgagctgccacctgccgactttttgcgccagccccaacccccactaaatgatctgatttcgtcacctgactgcaatgaggtagatttcattgaagctctcttgaaaggctcctgtgtgagcccagatgaagactgggtgtgcaacttgaggctgatcgacgacattttggaacagcatgctgctgctcaaaatgccacagcccagaattctgggcaagtcacccaggatgctggggcactttaaatctgagcaggatgcccatagaaacccccatggtgacatcactctaggaagtggtgtcgatccatacccgcagttgtctcccgttacaatttgagtggtgttgtcagcccatgcttatccctctctctacctgtgacaaaatggaaagctggtgatttttcaagctacgtgtacatatttgaaaattttgtaaatggttttcctaaacattaatgacagaagtatttatacttcattttgtgactttgtaaataaagcgacggcttttgtttcagtagagttgtgtttactatgcattgttttgtgtttattatacaatgttacaaatatgcagaccgtgttgtttgctccagtgataccttgttaagctaggtggctgagtcgcttatggttttaatgcaatgagcaatgtggatatgaccaagagttgttgtgcaagttgacaaatgccaaatagaaaaccacttggccatttatttctatgttcactaaaaatcctattgccttgtgtgattcttaatctcttttgcgaacctttcagtctccgctagctctttcctaatgagctttacagcagaagctgttttatcgttaagtgccccacagagacactttaccaggaggctgggagagttctccagatttgggagaggcgcagagacagtgtgtgagccgagccctgtctcagcaatccacctggaggagctagagtatcctcctccctttaccattcagaccgagagaaaaagcccagcttgtgtgcaccctcgtggggttaaggcgagctgttcctggtttaaagcctttcagtatttgttttgatgtaaggctctgtggtttgggggggaacatctgtaaacattattagttgatttggggtttgtctttgatggtttctatctgcaattatcgtcatgtatatttaagtgtctgttatagaaaacccacacccactgtcctgtaaacttttctcagtgtccagactttctgtaatcacattttaattgccacctcgtatttcacctctacatttgaaatctggcgtctgtttcaagccagtgtgttttttcttcgttctgtaataaacagccaggagaaaagtgcc

SEQ ID NO: 11449 - protein, 306 aa, Homo sapiens [sequence omitted]

SEQ ID NO: 11450 - DNA, 2069 bp, Homo sapiens
ttccttccaccagtaagcagatagtgtcaccgagttcttcaatggcacagtccaagagccaggtccaggccatgctccctgtcgctctgccccccttaccagtgcctcagtggcatcacgcccaccagctgaaggcgttggcagccagcaagcaggggtctgctacaaagcagcaagggcccacccccagttggtctggtctgcctcctccaggactctctccaccttaccgcccagtgccatcaccacacccaccaccgctgccactgccaccaccaccacccccattcagcccccagagcctcatggtgtcctgcatgtcgtccaataccttgtcgggtagcactctccgaggctctcccaatgccttactgtcaagcatgacgtccagcagcaatgctgccctggggcccgccatgccctatgctcctgagaagctccccagccctgctctcactcaacagccgcagttcggccctcagagctccattcttgccaacctcatgtcctctaccatcaaaacccctcaaggacacctgatgtctgctctgcctgccagcaaccctgggccgtccccaccctatcgcccagagaagctctctagcccaggcttgccacagcagtccttcaccccacagtgttccctgatccgaagcctcactcccaccagtaatcttctaaccagttcccaggtccgttcgacagaacggatattccccctgagctgccacctgccgactttttgcgccagccccaacccccactaaatgatctgatttcgtcacctgactgcaatgaggtagatttcattgaagctctcttgaaaggctcctgtgtgagcccagatgaagactgggtgtgcaacttgaggctgatcgacgacattttggaacagcatgctgctgctcaaaatgccacagcccagaattctgggcaagtcacccaggatgctggggcactttaaatctgagcaggatgcccatagaaacccccatggtgacatcactctaggaagtggtgtcgatccatacccgcagttgtctcccgttacaatttgagtggtgttgtcagcccatgcttatccctctctctacctgtgacaaaatggaaagctggtgatttttcaagctacgtgtacatatttgaaaattttgtaaatggttttcctaaacattaatgacagaagtatttatacttcattttgtgactttgtaaataaagcgacggcttttgtttcagtagagttgtgtttactatgcattgttttgtgtttattatacaatgttacaaatatgcagaccgtgttgtttgctccagtgataccttgttaagctaggtggctgagtcgcttatggttttaatgcaatgagcaatgtggatatgaccaagagttgttgtgcaagttgacaaatgccaaatagaaaaccacttggccatttatttctatgttcactaaaaatcctattgccttgtgtgattcttaatctcttttgcgaacctttcagtctccgctagctctttcctaatgagctttacagcagaagctgttttatcgttaagtgccccacagagacactttaccaggaggctgggagagttctccagatttgggagaggcgcagagacagtgtgtgagccgagccctgtctcagcaatccacctggaggagctagagtatcctcctccctttaccattcagaccgagagaaaaagcccagcttgtgtgcaccctcgtggggttaaggcgagctgttcctggtttaaagcctttcagtatttgttttgatgtaaggctctgtggtttgggggggaacatctgtaaacattattagttgatttggggtttgtctttgatggtttctatctgcaattatcgtcatgtatatttaagtgtctgttatagaaaacccacacccactgtcctgtaaacttttctcagtgtccagactttctgtaatcacattttaattgccacctcgtatttcacctctacatttgaaatctggcgtctgtttcaagccagtgtgttttttcttcgttctgtaataaacagccaggagaaaagtgcc

SEQ ID NO: 11451 - protein, 241 aa, Homo sapiens
MAQSKSQVQAMLPVALPPLPVPQWHHAHQLKALAASKQGSATKQQGPTPSWSGLPPPGLSPPYRPVPSPHPPPLPLPPPPPPFSPQSLMVSCMSSNTLSGSTLRGSPNALLSSMTSSSNAALGPAMPYAPEKLPSPALTQQPQFGPQSSILANLMSSTIKTPQGHLMSALPASNPGPSPPYRPEKLSSPGLPQQSFTPQCSLIRSLTPTSNLLTSSQVRSTERIFPLSCHLPTFCASPNPH

SEQ ID NO: 11452 - DNA, 6440 bp, Homo sapiens
ttgcctgccattcattttaggaagccgttgtagtttctgagggacgactaaagggaattttttcctaaaagcatccatccgtcctccaactaggcttcagatagcagtgtgtatgttgtcactatctatgggccatggccagtcagagcccacgggtctcagggggctccacccatgtgggggtgggggtccccacaactcagatcttgaatgtgtggtggtcccatgcagtatactatcttcctgtcattgcaaagggaaagtcagaagggtgaacgagttgtttctaattctggcttccaaacagtacaaaagaaggtttttttccttgtggaatacactagtgctcaacctttgggacagatagctgagcaccttctgctgtgtggcaggctggctctctgtgggggcactcatggagcagtgtctgctggaaaaggagacaggagttccctagcatggaggggtagataatctccccgctccctcccctcttctgtcctcccttccccttctccctcctcctctaccctcccctttttcctctcccctccccttcctcctcctcctcttccttctcttcctcttctttattctctctccctctcagtctccccttccctcccttccttcctcccttcctccacattctttataaaacaaggctttggatccattcactgccatcccccagaagtcttgtcatttgaattcttgtctgagtcaggatgctctcctccaagggctcatagggcaaggaacttcagcccgaatccggctaaaatccaggaacattttgtgggcatctgtctcagtccccgaatcgtttgtcctctgcctttcccccgttggagtccttttgcctgcttaagtggttgaattggtaatgagatcattcttcccatgcagtggtgagaaagcagcactcaggtgattgcacctgggtaaacaggagacattagcatgtggtagctggtgagtgaagctggtgcagtgcctggcgtgggctcagttgtgccagcaggcagtggtggagtttgggctctttcccctctctcctgcccagcacacaacccccagggacaggtgggggctttacagctccctggcgtcagcctaaagcttctagaaaggcatccccaggacttccaaggttgccatcttggctgagactgtctgtgaatgtggtcccttgtctgacagtgggggctgggaggggtgtgacagaggaagagctgggccttagttctctgggggtcaccatgagagaagcacacctgggcttgcatagaactcagtgctgcttgtcagtgtcacctggcacaacaggacgtagtgccacagttgcagccctagaaaatttgacgaccccttcatagctttgtttataaaaggccacacggcctaggctgtccttcataagagagcagaaagcgagtgtcccagtcactaagcagcaactttcaggcacggtttcctcctggtcactgaaaccatttgccatttcctgttttctccattttccaacgattctaattgtcagtgtcaaaaggcaacaactgttttcttggggcttatctttggagcacattgattcagaacaaaggatgggagcctccatctgcaaaacaaaggaagcagcctcctcgggaggcctggagagaatgctctggctcctttggccagggacagcaggaccagcataggagcagaggactggcggtgcctctggacactgccgtaaggtgaagagcccatggaggaccgtcgcttgctggtggcaccccagacttgaagatcctgcagagctggccaccggcacccaggctgggtgtcagcagcgctgtgtggccttggcagtttccatagtgataggctggccagcttttccattagactccggggtcctctggaatgtgtgcttcccgggatgaagacgccccagcacccgctgaagcctgccctgccccggcgtggcctttccttttgtctggcacgcccctgggcttggctttctctttccgtccctcccttcggactttaccgcacttcccctgctgtttccttagtcacactctccagcctccatctgcccctgcccctgaacccctacctctgtacaactgtgttatttgatgaaactaatgcagcaaccggtggggatggagttaaggaccgtttagacctagccagccacgcaggaatctgtccccagaagcagcagaagcacctggtctgcagttaggagatactgtacttcttagccgtgtcaccttgggcaagtcatttaacctctctgagcctctgctgtcacatcagtaagctggggactgtagatcttctgccctgatgtcctgagactggtacaagaagagccaaagcgaaaggactgccttcagaaatggctgccaaccctgaccatctcaggcagatccggatggtgtggccttgggcagtggtcatgtgacccccatgctcctcagtgtccacatggggtgttgctagatgacataaaataatgggtgagacgtgctcagtataatgagagcttgagaaggcagatcccaccccccatccccacccccaccccttgccgccttgccaatgctttggcagggagagggcagctccatagggcagctgagaaacagcccctcactgcccacacggcagctccagtggagggggaggcagggaccaggacaggaagcaggctaagggcgggatagaaaagcaaaccccagtctggtggaatcgcttctggtgtagtcttcccggtgccatgtgtttgtcctctctgccttggcaggaaccaaggccaggaactgctgccaggcctgagagctgggcacagtcccaagcactgggtcgctaccccgccccactcccaccagccccactgagtgcagagaagggttcccagaagccctttgctggaaaagcaggcactgcacgggcagcccgtgttgtagaggcaagtcctctggcatcttgggggggacacagaccagaaagtggacttggagcttgtgctcccagacagagctgccttggtggttgagaaggggagagagatggcagcagttgagcagagatggccgggctcccctcactgtgtggggtgaggcttcaagcactggactgggagtcagacctggatccgagtcacaacctgacaccaaccggctgagggtctcagagcaagtcatgccttttctgggtctgggggccttcatgttattccctcctggctatgttcttcccctttgctccttgagccgatcccagactgagtgctgaaactgcggccttgaaacttggctcgctcctccccctgcccacccagccagctttcagatggagacaggaagctcctcccaattgcctatgctgcaactagtcaggagaagggcgggaggttggcagtaagtgtttggctactcccagtgttggagactgtgtccacctgaccatgtgatcatctggccgttcatgccaggaccaccaggaacaagcctcagtcctcttctcaatgtcctttccctatgacagccctgcagaggctaggtatccaccactacatagcccacagtctgctctgccccagccacagcatccttggcttgctcagccattctttgtctgggtagtttgaagtccaatccccactctcattacttaccatcctctgaatgcagccagtctgtctgggtctccctgagactggcatgcccagactcctgtgggtatagtctggccaaggcagagttagcataggactgtcacctccctccttctacatactctgcttctattaatgcagcctaatgttacatttgttcttttggtgaccgcatctcactgctgacccatcctgagcagatggacatccaaaatgcctaaaacttttttctgtgtgctcttgctattaagttctgtctctcctgccccattctatgctgttgcagttgtgtttttaacccaggtgcagaatcttactttatttatacctgtggaattttgctcgagagggtggggcatgcatgcgagtgtatgctggtgtgtttattcatgctttctgctgcaccaaagccaagtcctaggtccccacgcagcgatcctaaggctaattattaattggtagctgtaatctaatttgtctttttcatcttctgtttagcaagaggaacagagatcaggtcttatggcaatgacccctgaacggcagaatgcatatatctcccaacagatgagtccatttgaagccgtccaagaacaagtcacctccaagtgtagccggatcaaggcaagccccccatctagcaagcacttgatgccacccagaactgggcttcttcagaacaatctgagtccaggaatgatcccactcaccaggcaccagagctgcgagggcatgggagtgatctcaccaactctggggaagcggcaaggaattttcacctccagcccccagtgtcccatcctctcacactcaggccagactcccctgggcagacttgactctgtctgccagcatatgcagagccccaaggccaccccaccagaagtgcccctgcctgggttctgtcccagctccctgggcacccagtccttgagtccccaccagctcagacggcctagtgtgccaagaatgcccactgcgttcaacaatgctgcatgggtcacagcggcagcagctgtgaccacagcagtttcggggaaaacacccctcagccaagtggataatagcgttcagcagcactcaccttctggccaggcctgccttcagaggccatctgattgggaggcacaagtgcccgctgcgatgggaacacaagtgcccctggccaacaaccccagcttcagcctgctgggcagccagagcctcaggcagagcccggtacagggcccggtgcctgtagcaaacaccaccaagttcctccagcagggtatggccagctttagtcccctgagccccatacagggcatcgagccaccaagctatgtggctgctgctgccaccgctgctgctgcttctgccgttgctgccagccagttcccaggtccgttcgacagaacggatattccccctgagctgccacctgccgactttttgcgccagccccaacccccactaaatgatctgatttcgtcacctgactgcaatgaggtagatttcattgaagctctcttgaaaggctcctgtgtgagcccagatgaagactgggtgtgcaacttgaggctgatcgacgacattttggaacagcatgctgctgctcaaaatgccacagcccagaattctgggcaagtcacccaggatgctggggcactttaaatctgagcaggatgcccatagaaacccccatggtgacatcactctaggaagtggtgtcgatccatacccgcagttgtctcccgttacaatttgagtggtgttgtcagcccatgcttatccctctctctacctgtgacaaaatggaaagctggtgatttttcaagctacgtgtacatatttgaaaattttgtaaatggttttcctaaacattaatgacagaagtatttatacttcattttgtgactttgtaaataaagcgacggcttttgtttcagtagagttgtgtttactatgcattgttttgtgtttattatacaatgttacaaatatgcagaccgtgttgtttgctccagtgataccttgttaagctaggtggctgagtcgcttatggttttaatgcaatgagcaatgtggatatgaccaagagttgttgtgcaagttgacaaatgccaaatagaaaaccacttggccatttatttctatgttcactaaaaatcctattgccttgtgtgattcttaatctcttttgcgaacctttcagtctccgctagctctttcctaatgagctttacagcagaagctgttttatcgttaagtgccccacagagacactttaccaggaggctgggagagttctccagatttgggagaggcgcagagacagtgtgtgagccgagccctgtctcagcaatccacctggaggagctagagtatcctcctccctttaccattcagaccgagagaaaaagcccagcttgtgtgcaccctcgtggggttaaggcgagctgttcctggtttaaagcctttcagtatttgttttgatgtaaggctctgtggtttgggggggaacatctgtaaacattattagttgatttggggtttgtctttgatggtttctatctgcaattatcgtcatgtatatttaagtgtctgttatagaaaacccacacccactgtcctgtaaacttttctcagtgtccagactttctgtaatcacattttaattgccacctcgtatttcacctctacatttgaaatctggcgtctgtttcaagccagtgtgttttttcttcgttctgtaataaacagccaggagaaaagtgcc

SEQ ID NO: 11453 - protein, 376 aa, Homo sapiens
MAMTPERQNAYISQQMSPFEAVQEQVTSKCSRIKASPPSSKHLMPPRTGLLQNNLSPGMIPLTRHQSCEGMGVISPTLGKRQGIFTSSPQCPILSHSGQTPLGRLDSVCQHMQSPKATPPEVPLPGFCPSSLGTQSLSPHQLRRPSVPRMPTAFNNAAWVTAAAAVTTAVSGKTPLSQVDNSVQQHSPSGQACLQRPSDWEAQVPAAMGTQVPLANNPSFSLLGSQSLRQSPVQGPVPVANTTKFLQQGMASFSPLSPIQGIEPPSYVAAAATAAAASAVAASQFPGPFDRTDIPPELPPADFLRQPQPPLNDLISSPDCNEVDFIEALLKGSCVSPDEDWVCNLRLIDDILEQHAAAQNATAQNSGQVTQDAGAL

SEQ ID NO: 11454 - DNA, 1113 bp, Homo sapiens; identical to SEQ ID NO: 1815

SEQ ID NO: 11455 - protein, 370 aa, Homo sapiens [sequence omitted]

SEQ ID NO: 11456 - DNA, 3436 bp, Homo sapiens
ccagagggggcggagcagggcccggcagccgagcagcctggcaacggcggtggcgcccggagcccgagagtttccaggatggcttctgcatcaacttctaaatataattcacactccttggagaatgagtctattaagaggacgtctcgagatggagtcaatcgagatctcactgaggctgttcctcgacttccaggagaaacactaatcactgacaaagaagttatttacatatgtcctttcaatggccccattaagggaagagtttacatcacaaattatcgtctttatttaagaagtttggaaacggattcttctctaatacttgatgttcctctgggtgtgatctcgagaattgaaaaaatgggaggcgcgacaagtagaggagaaaattcctatggtctagatattacttgtaaagacatgagaaacctgaggttcgctttgaaacaggaaggccacagcagaagagatatgtttgagatcctcacgagatacgcgtttcccctggctcacagtctgccattatttgcatttttaaatgaagaaaagtttaacgtggatggatggacagtttacaatccagtggaagaatacaggaggcagggcttgcccaatcaccattggagaataacttttattaataagtgctatgagctctgtgacacttaccctgctcttttggtggttccgtatcgtgcctcagatgatgacctccggagagttgcaacttttaggtcccgaaatcgaattccagtgctgtcatggattcatccagaaaataagacggtcattgtgcgttgcagtcagcctcttgtcggtatgagtgggaaacgaaataaagatgatgagaaatatctcgatgttatcagggagactaataaacaaatttctaaactcaccatttatgatgcaagacccagcgtaaatgcagtggccaacaaggcaacaggaggaggatatgaaagtgatgatgcatatcataacgccgaacttttcttcttagacattcataatattcatgttatgcgggaatctttaaaaaaagtgaaggacattgtttatcctaatgtagaagaatctcattggttgtccagtttggagtctactcattggttagaacatatcaagctcgttttgacaggagccattcaagtagcagacaaagtttcttcagggaagagttcagtgcttgtgcattgcagtgacggatgggacaggactgctcagctgacatccttggccatgctgatgttggatagcttctataggagcattgaagggttcgaaatactggtacaaaaagaatggataagttttggacataaatttgcatctcgaataggtcatggtgataaaaaccacaccgatgctgaccgttctcctatttttctccagtttattgattgtgtgtggcaaatgtcaaaacagttccctacagcttttgaattcaatgaacaatttttgattataattttggatcatctgtatagttgccgatttggtactttcttattcaactgtgaatctgctcgagaaagacagaaggttacagaaaggactgtttctttatggtcactgataaacagtaataaagaaaaattcaaaaaccccttctatactaaagaaatcaatcgagttttatatccagttgccagtatgcgtcacttggaactctgggtgaattactacattagatggaaccccaggatcaagcaacaacagccgaatccagtggagcagcgttacatggagctcttagccttacgcgacgaatacataaagcggcttgaggaactgcagctcgccaactctgccaagctttctgatcccccaacttcaccttccagtccttcgcaaatgatgccccatgtgcaaactcacttctgaggggggaccctggcaccgcattagagctcgaaataaaggcgatagctgactttcatttggggcatttgtaaaaagtagattaaaatatttgcctccatgtagaacttgaactaacataatcttaaactcttgaatatgtgccttctagaatacatattacaagaaaactacagggtccacacggcaatcagaagaaaggagctgagatgaggttttggaaaaccctgacacctttaaaaagcagtttttgaaagacaaaatttagatttaatttacgtcttgagaaatactatatatacaatatatattttgtgggcttaattgaaacaacattattttaaaatcaaaggggatatatgtttgtggaatggattttcctgaagctgcttaacagttgctttggattctctaagatgaatccaaatgtgaaagatgcatgttactgccaaaaccaaattgagctcagcttcctaggcattacccaaaagcaaggtgtttaagtaattgccagcttttataccatcatgagtggtgacttaaggagaaatagctgtatagatgagtttttcattatttggaaatttaggggtagaaaatgttttcccctaattttccagagaagcctatttttatatttttaaaaaactgacagggcccagttaaatatgatttgcattttttaaatttgccagttttattttctaaattctttcatgagcttgcctaaaattcggaatggttttcgggttgtggcaaaccccaaagagagcactgtccaaggatgtcgggagcatcctgctgcttaggggaatgttttcgcaaatgttgctctagtcagtccagctcatctgccaaaatgtagggctaccgtcttggatgcatgagctattgctagagcatcatccttagaaatcagtgccccagatgtacatgtgttgagcgtattcttgaaagtattgtgtttatgcatttcaatttcaatggtgttggcttcccctccccaccccacgcgtgcataaaaactggttctacaaatttttacttgaagtaccaggccgtttgctttttcaggttgttttgttttatagtattaagtgaaattttaaatgcacagttctatttgctatctgaactaattcatttattaagtatatttgtaaaagctaaggctcgagttaaaacaatgaagtgttttacaatgatttgtaaaggactatttataactaatatggttttgttttcaatgaattaagaaagattaaatatatctttgtaaattattttatgtcatagtttaattggtctaccaagtaagacatctcaaatacagtagtataatgtatgaattttgtaagtataagaaattttattagacattctcttactttttgtaaatgctgtaaatatttcataaattaacaaagtgtcactccataaaaagaaagctaatactaatagcctaaaagattttgtgaaatttcatgaaaactttttaatggcaataatgactaaagacctgctgtaataaatgtattaactgaaacct

SEQ ID NO: 11457 - protein, 603 aa, Homo sapiens; identical to SEQ ID NO: 1818

SEQ ID NO: 11458 - DNA, 3616 bp, Homo sapiens
ccagagggggcggagcagggcccggcagccgagcagcctggcaacggcggtggcgcccggagcccgagagtttccaggatggcttctgcatcaacttctaaatataattcacactccttggagaatgagtctattaagaggacgtctcgagatggagtcaatcgagatctcactgaggctgttcctcgacttccaggagaaacactaatcactgacaaagaagttatttacatatgtcctttcaatggccccattaagggaagagtttacatcacaaattatcgtctttatttaagaagtttggaaacggattcttctctaatacttgatgttcctctgggtgtgatctcgagaattgaaaaaatgggaggcgcgacaagtagaggagaaaattcctatggtctagatattacttgtaaagacatgagaaacctgaggttcgctttgaaacaggaaggccacagcagaagagatatgtttgagatcctcacgagatacgcgtttcccctggctcacagtctgccattatttgcatttttaaatgaagaaaagtttaacgtggatggatggacagtttacaatccagtggaagaatacaggaggcagggcttgcccaatcaccattggagaataacttttattaataagtgctatgagctctgtgacacttaccctgctcttttggtggttccgtatcgtgcctcagatgatgacctccggagagttgcaacttttaggtcccgaaatcgaattccagtgctgtcatggattcatccagaaaataagacggtcattgtgcgttgcagtcagcctcttgtcggtatgagtgggaaacgaaataaagatgatgagaaatatctcgatgttatcagggagactaataaacaaatttctaaactcaccatttatgatgcaagacccagcgtaaatgcagtggccaacaaggcaacaggaggaggatatgaaagtgatgatgcatatcataacgccgaacttttcttcttagacattcataatattcatgttatgcgggaatctttaaaaaaagtgaaggacattgtttatcctaatgtagaagaatctcattggttgtccagtttggagtctactcattggttagaacatatcaagctcgttttgacaggagccattcaagtagcagacaaagtttcttcagggaagagttcagtgcttgtgcattgcagtgacggatgggacaggactgctcagctgacatccttggccatgctgatgttggatagcttctataggagcattgaagggttcgaaatactggtacaaaaagaatggataagttttggacataaatttgcatctcgaataggtcatggtgataaaaaccacaccgatgctgaccgttctcctatttttctccagtttattgattgtgtgtggcaaatgtcaaaacagttccctacagcttttgaattcaatgaacaatttttgattataattttggatcatctgtatagttgccgatttggtactttcttattcaactgtgaatctgctcgagaaagacagaaggttacagaaaggactgtttctttatggtcactgataaacagtaataaagaaaaattcaaaaaccccttctatactaaagaaatcaatcgagttttatatccagttgccagtatgcgtcacttggaactctgggtgaattactacattagatggaaccccaggatcaagcaacaacagccgaatccagtggagcagcgttacatggagctcttagccttacgcgacgaatacataaagcggcttgaggaactgcagctcgccaactctgccaagctttctgatcccccaacttcaccttccagtccttcgcaaatgatgccccatgtgcaaactcacttctgaggggggaccctggcaccgcattagagctcgaaataaaggcgatagctgactttcatttggggcatttgtaaaaagtagattaaaatatttgcctccatgtagaacttgaactaacataatcttaaactcttgaatatgtgccttctagaatacatattacaagaaaactacagggtccacacggcaatcagaagaaaggagctgagatgaggttttggaaaaccctgacacctttaaaaagcagtttttgaaagacaaaatttagatttaatttacgtcttgagaaatactatatatacaatatatattttgtgggcttaattgaaacaacattattttaaaatcaaaggggatatatgtttgtggaatggattttcctgaagctgcttaacagttgctttggattctctaagatgaatccaaatgtgaaagatgcatgttactgccaaaaccaaattgagctcagcttcctaggcattacccaaaagcaaggtgtttaagtaattgccagcttttataccatcatgagtggtgacttaaggagaaatagctgtatagatgagtttttcattatttggaaatttaggggtagaaaatgttttcccctaattttccagagaagcctatttttatatttttaaaaaactgacagggcccagttaaatatgatttgcattttttaaatttgccagttttattttctaaattctttcatgagcttgcctaaaattcggaatggttttcgggttgtggcaaaccccaaagagagcactgtccaaggatgtcgggagcatcctgctgcttaggggaatgttttcgcaaatgttgctctagtcagtccagctcatctgccaaaatgtagggctaccgtcttggatgcatgagctattgctagagcatcatccttagaaatcagtgccccagatgtacatgtgttgagcgtattcttgaaagtattgtgtttatgcatttcaatttcaatggtgttggcttcccctccccaccccacgcgtgcataaaaactggttctacaaatttttacttgaagtaccaggccgtttgctttttcaggttgttttgttttatagtattaagtgaaattttaaatgcacagttctatttgctatctgaactaattcatttattaagtatatttgtaaaagctaaggctcgagttaaaacaatgaagtgttttacaatgatttgtaaaggactatttataactaatatggttttgttttcaatgaattaagaaagattaaatatatctttgtaaattattttatgtcatagtttaattggtctaccaagtaagacatctcaaatacagtagtataatgtatgaattttgtaagtataagaaattttattagacattctcttactttttgtaaatgctgtaaatatttcataaattaacaaagtgtcactccataaaaagaaagctaatactaatagcctaaaagattttgtgaaatttcatgaaaactttttaatggcaataatgactaaagacctgctgtaataaatgtattaactgaaacctaacactgttttcagggctgtgagtgtgcatgtgttggaaatgtgcatggtggccatctgatttctttgcccgggtctgcttcatgtactttttatctcaccggcaaccttgcagggctctcccaaaatttcagcaagattgggcatttaagtgtattaaacagtgcagattttaagagtc

SEQ ID NO: 11459 - protein, 603 aa, Homo sapiens; identical to SEQ ID NO: 1818

SEQ ID NO: 11460 - DNA, 2961 bp, Homo sapiens
ggcaacggcggtggcgcccggagcccgagagtttccaggatggcttctgcatcaacttctaaatataattcacactccttggagaatgagtctattaagaggacgtctcgagatggagtcaatcgagatctcactgaggctgttcctcgacttccaggagaaacactaatcactgacaaagaagttatttacatatgtcctttcaatggccccattaagggaagagtttacatcacaaattatcgtctttatttaagaaaagagatatgtttgagatcctcacgagatacgcgtttcccctggctcacagtctgccattatttgcatttttaaatgaagaaaagtttaacgtggatggatggacagtttacaatccagtggaagaatacaggaggcagggcttgcccaatcaccattggagaataacttttattaataagtgctatgagctctgtgacacttaccctgctcttttggtggttccgtatcgtgcctcagatgatgacctccggagagttgcaacttttaggtcccgaaatcgaattccagtgctgtcatggattcatccagaaaataagacggtcattgtgcgttgcagtcagcctcttgtcggtatgagtgggaaacgaaataaagatgatgagaaatatctcgatgttatcagggagactaataaacaaatttctaaactcaccatttatgatgcaagacccagcgtaaatgcagtggccaacaaggcaacaggaggaggatatgaaagtgatgatgcatatcataacgccgaacttttcttcttagacattcataatattcatgttatgcgggaatctttaaaaaaagtgaaggacattgtttatcctaatgtagaagaatctcattggttgtccagtttggagtctactcattggttagaacatatcaagctcgttttgacaggagccattcaagtagcagacaaagtttcttcagggaagagttcagtgcttgtgcattgcagtgacggatgggacaggactgctcagctgacatccttggccatgctgatgttggatagcttctataggagcattgaagggttcgaaatactggtacaaaaagaatggataagttttggacataaatttgcatctcgaataggtcatggtgataaaaaccacaccgatgctgaccgttctcctatttttctccagtttattgattgtgtgtggcaaatgtcaaaacagttccctacagcttttgaattcaatgaacaatttttgattataattttggatcatctgtatagttgccgatttggtactttcttattcaactgtgaatctgctcgagaaagacagaaggttacagaaaggactgtttctttatggtcactgataaacagtaataaagaaaaattcaaaaaccccttctatactaaagaaatcaatcgagttttatatccagttgccagtatgcgtcacttggaactctgggtgaattactacattagatggaaccccaggatcaagcaacaacagccgaatccagtggagcagcgttacatggagctcttagccttacgcgacgaatacataaagcggcttgaggaactgcagctcgccaactctgccaagctttctgatcccccaacttcaccttccagtccttcgcaaatgatgccccatgtgcaaactcacttctgaggggggaccctggcaccgcattagagctcgaaataaaggcgatagctgactttcatttggggcatttgtaaaaagtagattaaaatatttgcctccatgtagaacttgaactaacataatcttaaactcttgaatatgtgccttctagaatacatattacaagaaaactacagggtccacacggcaatcagaagaaaggagctgagatgaggttttggaaaaccctgacacctttaaaaagcagtttttgaaagacaaaatttagatttaatttacgtcttgagaaatactatatatacaatatatattttgtgggcttaattgaaacaacattattttaaaatcaaaggggatatatgtttgtggaatggattttcctgaagctgcttaacagttgctttggattctctaagatgaatccaaatgtgaaagatgcatgttactgccaaaaccaaattgagctcagcttcctaggcattacccaaaagcaaggtgtttaagtaattgccagcttttataccatcatgagtggtgacttaaggagaaatagctgtatagatgagtttttcattatttggaaatttaggggtagaaaatgttttcccctaattttccagagaagcctatttttatatttttaaaaaactgacagggcccagttaaatatgatttgcattttttaaatttgccagttttattttctaaattctttcatgagcttgcctaaaattcggaatggttttcgggttgtggcaaaccccaaagagagcactgtccaaggatgtcgggagcatcctgctgcttaggggaatgttttcgcaaatgttgctctagtcagtccagctcatctgccaaaatgtagggctaccgtcttggatgcatgagctattgctagagcatcatccttagaaatcagtgccccagatgtacatgtgttgagcgtattcttgaaagtattgtgtttatgcatttcaatttcaatggtgttggcttcccctccccaccccacgcgtgcataaaaactggttctacaaatttttacttgaagtaccaggccgtttgctttttcaggttgttttgttttatagtattaagtgaaattttaaatgcacagttctatttgctatctgaactaattcatttattaagtatatttgtaaaagctaaggctcgagttaaaacaatgaagtgttttacaatgatttgtaaaggactatttataactaatatggttttgttttcaatgaattaagaaagattaaatatatctttgtaaatt

SEQ ID NO: 11461 - protein, 471 aa, Homo sapiens
MFEILTRYAFPLAHSLPLFAFLNEEKFNVDGWTVYNPVEEYRRQGLPNHHWRITFINKCYELCDTYPALLVVPYRASDDDLRRVATFRSRNRIPVLSWIHPENKTVIVRCSQPLVGMSGKRNKDDEKYLDVIRETNKQISKLTIYDARPSVNAVANKATGGGYESDDAYHNAELFFLDIHNIHVMRESLKKVKDIVYPNVEESHWLSSLESTHWLEHIKLVLTGAIQVADKVSSGKSSVLVHCSDGWDRTAQLTSLAMLMLDSFYRSIEGFEILVQKEWISFGHKFASRIGHGDKNHTDADRSPIFLQFIDCVWQMSKQFPTAFEFNEQFLIIILDHLYSCRFGTFLFNCESARERQKVTERTVSLWSLINSNKEKFKNPFYTKEINRVLYPVASMRHLELWVNYYIRWNPRIKQQQPNPVEQRYMELLALRDEYIKRLEELQLANSAKLSDPPTSPSSPSQMMPHVQTHF

SEQ ID NO: 11462 - DNA, 577 bp, Homo sapiens
aacggcggtggcgcccggagcccgagagtttccaggatggcttctgcatcaacttctaaatataattcacactccttggagaatgagtctattaagaggacgtctcgagatggagtcaatcgagatctcactgaggctgttcctcgacttccaggagaaacactaatcactgacaaagaagttatttacatatgtcctttcaatggccccattaagggaagagtttacatcacaaattatcgtctttatttaagaagtttggaaacggattcttctctaatacttgatgttcctctgggtgtgatctcgagaattgaaaaaatgggaggcgcgacaagtagaggagaaaattcctatggtctagatattacttgtaaagacatgagaaacctgaggttcgctttgaaacaggaaggccacagcagaagagatatgtttgagatcctcacgagatacgcgtttcccctggctcacagtctggtaaattccagtgctctcctcagcgtgggaaggttctcagtgcctcctctgtgaaaactgcctgcaaactgggatcctctttcttttaatgtctgtg

SEQ ID NO: 11463 - protein, 165 aa, Homo sapiens
MASASTSKYNSHSLENESIKRTSRDGVNRDLTEAVPRLPGETLITDKEVIYICPFNGPIKGRVYITNYRLYLRSLETDSSLILDVPLGVISRIEKMGGATSRGENSYGLDITCKDMRNLRFALKQEGHSRRDMFEILTRYAFPLAHSLVNSSALLSVGRFSVPPL

SEQ ID NO: 11464 - DNA, 1583 bp, Homo sapiens
gcggccttgtgggtaacgcggggccgccaggtgacagctaatggcggcggccgcctgaggcgggcgggcggtatagagcgggcggcaggaggcaagcagcgaaaccttcccggccgccgctcccgtcccgacggcggcttccccaaggcggcaggactcggcgcgccatggacaggccggcggcggcggcggcggcgggctgcgagggcggcgggggcccgaacccggggccggcgggcggcaggaggcctcctcgggccgcggggggcgccaccgccggctcccggcagcccagcgtggagaccctggacagtcccacaggatcacatgttgaatggtgtaaacagcttatagctgctacaatttctagtcagatttcaggttcagtgacatcagaaaatgtgtccagagattacaaggctctaagggatggaaataagctggcacagatggaagaggctccacttttcccaggagaatcaattaaagccattgtgaaagatgtcatgtatatctgcccatttatgggagcagtgagtggaaccctgacagtgacggactttaagctgtacttcaaaaatgtcgagagggacccgcattttatccttgatgttccccttggagtgatcagcagagtggagaagattggagcacagagccatggagacaattcctgtggtatagagatagtgtgcaaggatatgaggaacttgcggcttgcttataaacaggaagaacagagtaaactagggatatttgaaaacctcaacaaacatgcatttcctctttctaacggacaggcactatttgcattcagctataaagaaaaatttccaattaatggctggaaagtttatgatccagtatctgaatataagagacagggcttgccaaatgagagttggaaaatatccaaaataaacagtaattatgagttctgtgacacctaccctgccatcattgttgtgccaactagtgtaaaagatgatgacctttcaaaagtggcagcttttcgagcaaaaggcagagtccctgtgttgtcatggattcatccggaaagtcaagcaacgattacccgttgcagccagccacttgtgggtcccaatgataagcgctgcaaagaggatgaaaaatacttgcaaacaataatggatgctaacgcacagtcacacaagcttatcatctttgatgctcgacaaaacagtgtcgctgataccaacaagctttggtatcaggatacagctagcctcatggaatgaactaggaagtatgccctcctcttctagtttttggatgacccatcatctcttacctcacctacagcaggaaccttgaaattggacttctgcctcacaccctgcaatctcatctccacattatgaccagagtgatcttcttttttaaaaaaaacttattgttactatttcaattgataaatgaattgtatatatttatggtgtacaacgtggtattttgattgtgtacacattgtggaatggctaaatcaagctaattaacacaccattttttgtggtgagaacacttaaaatctactctcagcagttttcagatacagactacat

SEQ ID NO: 11465 - protein, 363 aa, Homo sapiens
MDRPAAAAAAGCEGGGGPNPGPAGGRRPPRAAGGATAGSRQPSVETLDSPTGSHVEWCKQLIAATISSQISGSVTSENVSRDYKALRDGNKLAQMEEAPLFPGESIKAIVKDVMYICPFMGAVSGTLTVTDFKLYFKNVERDPHFILDVPLGVISRVEKIGAQSHGDNSCGIEIVCKDMRNLRLAYKQEEQSKLGIFENLNKHAFPLSNGQALFAFSYKEKFPINGWKVYDPVSEYKRQGLPNESWKISKINSNYEFCDTYPAIIVVPTSVKDDDLSKVAAFRAKGRVPVLSWIHPESQATITRCSQPLVGPNDKRCKEDEKYLQTIMDANAQSHKLIIFDARQNSVADTNKLWYQDTASLME

SEQ ID NO: 11466 - DNA, 2765 bp, Homo sapiens
gcggccttgtgggtaacgcggggccgccaggtgacagctaatggcggcggccgcctgaggcgggcgggcggtatagagcgggcggcaggaggcaagcagcgaaaccttcccggccgccgctcccgtcccgacggcggcttccccaaggcggcaggactcggcgcgccatggacaggccggcggcggcggcggcggcgggctgcgagggcggcgggggcccgaacccggggccggcgggcggcaggaggcctcctcgggccgcggggggcgccaccgccggctcccggcagcccagcgtggagaccctggacagtcccacaggatcacatgttgaatggtgtaaacagcttatagctgctacaatttctagtcagatttcaggttcagtgacatcagaaaatgtgtccagagattacaaggctctaagggatggaaataagctggcacagatggaagaggctccacttttcccaggagaatcaattaaagccattgtgaaagatgtcatgtatatctgcccatttatgggagcagtgagtggaaccctgacagtgacggactttaagctgtacttcaaaaatgtcgagagggacccgcattttatccttgatgttccccttggagtgatcagcagagtggagaagattggagcacagagccatggagacaattcctgtggtatagagatagtgtgcaaggatatgaggaacttgcggcttgcttataaacaggaagaacagagtaaactagggatatttgaaaacctcaacaaacatgcatttcctctttctaacggacaggcactatttgcattcagctataaagaaaaatttccaattaatggctggaaagtttatgatccagtatctgaatataagagacagggcttgccaaatgagagttggaaaatatccaaaataaacagtaattatgagttctgtgacacctaccctgccatcattgttgtgccaactagtgtaaaagatgatgacctttcaaaagtggcagcttttcgagcaaaaggcagagtccctgtgttgtcatggattcatccggaaagtcaagcaacgattacccgttgcagccagccacttgtgggtcccaatgataagcgctgcaaagaggatgaaaaatacttgcaaacaataatggatgctaacgcacagtcacacaagcttatcatctttgatgctcgacaaaacagtgtcgctgataccaacaagacaaagggtggaggatatgaaagtgaaagtgcttacccaaatgcagaacttgtgttcttggagatccacaacattcatgtcatgcgagagtcactacgcaaattaaaagagattgtgtacccttcgatcgatgaggcgcggtggctctccaatgtggatgggacgcattggctggaatatataaggatgctgcttgctggggcagtaagaattgctgataaaatagaatctgggaaaacatctgtggtggtgcattgcagcgacggttgggaccgaacagcccagctcacatctctggctatgctaatgttggacagttactacaggaccattaaaggatttgaaactctcgtagaaaaggagtggataagctttggacacaggtttgcactgcgagtgggccatggtaatgacaaccatgcggatgctgaccgatctcccatatttctgcagtttgttgattgtgtttggcaaatgacaaggcagtttccttcagcattcgagtttaatgagctattcttgattacaattttggatcacctttatagctgtctttttgggacctttttgtgcaactgtgaacagcagcgattcaaagaggatgtatatacaaagacgatatctttatggtcgtatatcaatagccagctagacgagttttctaatcccttctttgtgaattatgaaaaccacgtgttatatcctgttgctagtctgagtcatttggaattgtgggtaaattattatgtacgatggaatccacggatgagacctcagatgcccattcaccagaatctcaaggagctgctggccgtcagggcggagctgcagaagcgtgtggagggcctacagcgggaggtggccacgcgcgccgtctcatcctcatctgagcggggctcctcgccctcccactccgccacctccgtccacacctcggtctgatgggcgagaaatatgtaatcccctggctgactaggactgttaaacatagtgtggactggatgatgccttcgacaaaccagagaagccaagttggggggagctggtgcctggagtgggccctgtgcacctcacctggcggaggctggggggggctctgtcagcaggaccctagaggagactctcattcgattttaaagaagcacaacgggtcattttcctttgtatgttcctagcgcagaactgtttctaaaacaacttgaagtatagttttgttatctaagcaatttttgttttaagtaagtaagtgtactagaatgcgaagccgttatggttcaggtttttaaaaactggtacagtattgtatttgtctcatctgttgcactgtatttcaatcatctgtaattaaaatgatcatatgtttgctccctggtcttttttaagtaagtaagtaagtatcttagtagatttttcctttgaggaaaatcggtaataaaataacatggattgaatgtttactgtgcgtcaagcacagttaatatatgatgatgtaaagtaactaactttatgtgatttaattcattcagtaaattgtaaatgtat

SEQ ID NO: 11467 - protein, 665 aa, Homo sapiens; identical to SEQ ID NO: 1820

SEQ ID NO: 11468 - DNA, 2976 bp, Homo sapiens
gcggccttgtgggtaacgcggggccgccaggtgacagctaatggcggcggccgcctgaggcgggcgggcggtatagagcgggcggcaggaggcaagcagcgaaaccttcccggccgccgctcccgtcccgacggcggcttccccaaggcggcaggactcggcgcgccatggacaggccggcggcggcggcggcggcgggctgcgagggcggcgggggcccgaacccggggccggcgggcggcaggaggcctcctcgggccgcggggggcgccaccgccggctcccggcagcccagcgtggagaccctggacagtcccacaggatcacatgttgaatggtgtaaacagcttatagctgctacaatttctagtcagatttcaggttcagtgacatcagaaaatgtgtccagagattacaaggctctaagggatggaaataagctggcacagatggaagaggctccacttttcccaggagaatcaattaaagccattgtgaaagatgtcatgtatatctgcccatttatgggagcagtgagtggaaccctgacagtgacggactttaagctgtacttcaaaaatgtcgagagggacccgcattttatccttgatgttccccttggagtgatcagcagagtggagaagattggagcacagagccatggagacaattcctgtggtatagagatagtgtgcaaggatatgaggaacttgcggcttgcttataaacaggaagaacagagtaaactagggatatttgaaaacctcaacaaacatgcatttcctctttctaacggacaggcactatttgcattcagctataaagaaaaatttccaattaatggctggaaagtttatgatccagtatctgaatataagagacagggcttgccaaatgagagttggaaaatatccaaaataaacagtaattatgagttctgtgacacctaccctgccatcattgttgtgccaactagtgtaaaagatgatgacctttcaaaagtggcagcttttcgagcaaaaggcagagtccctgtgttgtcatggattcatccggaaagtcaagcaacgattacccgttgcagccagccacttgtgggtcccaatgataagcgctgcaaagaggatgaaaaatacttgcaaacaataatggatgctaacgcacagtcacacaagcttatcatctttgatgctcgacaaaacagtgtcgctgataccaacaagacaaagggtggaggatatgaaagtgaaagtgcttacccaaatgcagaacttgtgttcttggagatccacaacattcatgtcatgcgagagtcactacgcaaattaaaagagattgtgtacccttcgatcgatgaggcgcggtggctctccaatgtggatgggacgcattggctggaatatataaggatgctgcttgctggggcagtaagaattgctgataaaatagaatctgggaaaacatctgtggtggtgcattgcagcgacggttgggaccgaacagcccagctcacatctctggctatgctaatgttggacagttactacaggaccattaaaggatttgaaactctcgtagaaaaggagtggataagctttggacacaggtttgcactgcgagtgggccatggtaatgacaaccatgcggatgctgaccgatctcccatatttctgcagtttgttgattgtgtttggcaaatgacaaggcagtttccttcagcattcgagtttaatgagctattcttgattacaattttggatcacctttatagctgtctttttgggacctttttgtgcaactgtgaacagcagcgattcaaagaggcatggggggctgggacccagcgagcccgtggctctctcaggagtagatgagtgctagaccctggacctcctgactccgagttcatgtagtctccgctgcaccaactccaaaaccgtgggattctgcttttcatcctctgtggtgttggccagatcatacttgaaggccttggaaatggagtctgctgattagccaaaaagcccactttaggatgtatatacaaagacgatatctttatggtcgtatatcaatagccagctagacgagttttctaatcccttctttgtgaattatgaaaaccacgtgttatatcctgttgctagtctgagtcatttggaattgtgggtaaattattatgtacgatggaatccacggatgagacctcagatgcccattcaccagaatctcaaggagctgctggccgtcagggcggagctgcagaagcgtgtggagggcctacagcgggaggtggccacgcgcgccgtctcatcctcatctgagcggggctcctcgccctcccactccgccacctccgtccacacctcggtctgatgggcgagaaatatgtaatcccctggctgactaggactgttaaacatagtgtggactggatgatgccttcgacaaaccagagaagccaagttggggggagctggtgcctggagtgggccctgtgcacctcacctggcggaggctggggggggctctgtcagcaggaccctagaggagactctcattcgattttaaagaagcacaacgggtcattttcctttgtatgttcctagcgcagaactgtttctaaaacaacttgaagtatagttttgttatctaagcaatttttgttttaagtaagtaagtgtactagaatgcgaagccgttatggttcaggtttttaaaaactggtacagtattgtatttgtctcatctgttgcactgtatttcaatcatctgtaattaaaatgatcatatgtttgctccctggtcttttttaagtaagtaagtaagtatcttagtagatttttcctttgaggaaaatcggtaataaaataacatggattgaatgtttactgtgcgtcaagcacagttaatatatgatgatgtaaagtaactaactttatgtgatttaattcattcagtaaattgtaaatgtat

SEQ ID NO: 11469 - protein, 568 aa, Homo sapiens
MDRPAAAAAAGCEGGGGPNPGPAGGRRPPRAAGGATAGSRQPSVETLDSPTGSHVEWCKQLIAATISSQISGSVTSENVSRDYKALRDGNKLAQMEEAPLFPGESIKAIVKDVMYICPFMGAVSGTLTVTDFKLYFKNVERDPHFILDVPLGVISRVEKIGAQSHGDNSCGIEIVCKDMRNLRLAYKQEEQSKLGIFENLNKHAFPLSNGQALFAFSYKEKFPINGWKVYDPVSEYKRQGLPNESWKISKINSNYEFCDTYPAIIVVPTSVKDDDLSKVAAFRAKGRVPVLSWIHPESQATITRCSQPLVGPNDKRCKEDEKYLQTIMDANAQSHKLIIFDARQNSVADTNKTKGGGYESESAYPNAELVFLEIHNIHVMRESLRKLKEIVYPSIDEARWLSNVDGTHWLEYIRMLLAGAVRIADKIESGKTSVVVHCSDGWDRTAQLTSLAMLMLDSYYRTIKGFETLVEKEWISFGHRFALRVGHGNDNHADADRSPIFLQFVDCVWQMTRQFPSAFEFNELFLITILDHLYSCLFGTFLCNCEQQRFKEAWGAGTQRARGSLRSR

SEQ ID NO: 11470 - DNA, 936 bp, Homo sapiens
ttctagtcagatttcaggttcagtgacatcagaaaatgtgtccagagattacaaggctctaagggatggaaataagctggcacagatggaagaggctccacttttcccaggagaatcaattaaagccattggtcatgggctgctcatggacaggaacttcttccaattatacccagaatcccagcaatagaaggctctcagtacataaggagtatagaaaagttcaatggaagtattctgagaatttggttcaatgacgttaatgccttttgttgtctcacttggactcatatatagctatgtatattcttgtcattccagtggaatggcactttgggaaaacatgaagatgtggtatctttgtgatagaagtgagcttcttaacactaatgggaattaaatatgtcacgcacttaatagatattgacaaaaaattaaaactgataaggggataaggaatttgaaataagtctttttccatttcattgatgtggttctaggttttgtcttctgtaaaaagagtttcctttggagatgcattaggagacaatctttagttttcattagttttaagtagcagtaattcatgaaacagtagcccagggttttcagagtttaattaatgttttgaatatgattaatttatcacccagggaaaatgttaactacctaggaaaaatgacagaatataacttcttatgaggccctttacttaaaacctcattaagtagcaaatcagaattttgttttaaaaaattgaaatttattagaagactatgcatctctctatattgaaagtcataattgatataatcctataaaatacaaaattcctggaaaactggaatcacaaatatatatttggaaaactcgtgttaagttttatggaagcacaagtctatggcagtagttgctactttggcctttttctttcag

SEQ ID NO: 11471 - protein, 63 aa, Homo sapiens
MEISWHRWKRLHFSQENQLKPLVMGCSWTGTSSNYTQNPSNRRLSVHKEYRKVQWKYSENLVQ

SEQ ID NO: 11472 - DNA, 2056 bp, Homo sapiens
tttgcatgtattttcataagggatgttaatctgtggttttctcttcttgtgatgtctttgtctagctttggtatcaggatacagctagcctcatggaatgaactaggaagtatgccctcctcttctagtttttggatgacccatcatctcttacctcacctacagcaggaaccttgaaattggacttctgcctcacaccctgcaatctcatctccacattatgaccagagtgatcttcttttttaaaaaaaacttattgttactatttcaattgataaatgaattgtatatatttatggtgtacaacgtggtattttgattgtgtacacattgtggaatggctaaatcaagctaattaacacaccattttttgtggtgagaacacttaaaatctactctcagcagttttcagatacagactacattgttattgactgtagtcaccatgttgtacagagtgatcttctcagtggacaactctgtgcacatccctcagagccgcaaggcagtgatatccaggttcctgaacagggtctccaaagccctccacccacgggtcctttccttcctgtctcgccacatcttccaggtccatgtctcagctatgtgaggttcttttcagttccttaagcacatcccactgttagctcagagatatgttgcagtcctaactccaagtacctataaatgtggccttatttcacaatagggtctttgtaaatgtaattaagttaggatgtggtcatattgaattggggggtgggggttaagccaaatgactgtgtccttagaagaagaggagaagagacagacacagacaaaggaaagaaggtcaggtggaaatggaggcagagatcagaatgatgtgtgtataagccaagaacacctgggactatcggaacctggggcagccaaggaaggatcctcccctagagtgttcggaggaagcatggcactgccgataccttgaattcagacttccagcctccagaactaggagagaataaacttctgttgttttaagccactgagtttgtggttctttttccagcagccctaggaaactcatacaaggatataggaggtttatttgcagatgagtttgttgcttctttagtggtctgtatctcatagcactagaaagaatagaaaagttaattccagataatgtgatgtatttgttttgtttttcgtagacaaagggtggaggatatgaaagtgaaagtgcttacccaaatgcagaacttgtgttcttggagatccacaacattcatgtcatgcgagagtcactacgcaaattaaaagagattgtgtacccttcgatcgatgaggcgcggtggctctccaatgtggatgggacgcattggctggaatatataaggatgctgcttgctggggcagtaagaattgctgataaaatagaatctgggaaaacatctgtggtggtgcattgcagcgacggttgggaccgaacagcccagctcacatctctggctatgctaatgttggacagttactacaggaccattaaaggatttgaaactctcgtagaaaaggagtggataagctttggacacaggtttgcactgcgagtgggccatggtaatgacaaccatgcggatgctgaccgatctcccatatttctgcagtttgttgattgtgtttggcaaatgacaaggcagtttccttcagcattcgagtttaatgagctattcttgattacaattttggatcacctttatagctgtctttttgggacctttttgtgcaactgtgaacagcagcgattcaaagaggcatggggggctgggacccagcgagcccgtggctctctcaggagtagatgagtgctagaccctggacctcctgactccgagttcatgtagtctccgctgcaccaactccaaaaccgtgggattctgcttttcatcctctgtggtgttggccagatcatacttgaaggccttggaaatggagtctgctgattagccaaaaagcccactttaggtagcaagctaacacttttttacatcaaagtagtaaagaagcagttacc

SEQ ID NO: 11473 - protein, 189 aa, Homo sapiens
MRESLRKLKEIVYPSIDEARWLSNVDGTHWLEYIRMLLAGAVRIADKIESGKTSVVVHCSDGWDRTAQLTSLAMLMLDSYYRTIKGFETLVEKEWISFGHRFALRVGHGNDNHADADRSPIFLQFVDCVWQMTRQFPSAFEFNELFLITILDHLYSCLFGTFLCNCEQQRFKEAWGAGTQRARGSLRSR

SEQ ID NO: 11474 - DNA, 588 bp, Homo sapiens
atttgtttcccttctctcagggtcacagtccagtactgcctgttgccagtgtctgaaaacagtcatttcttatattgtatccagcttgctagatgtttctgacagaagggtgagtctgggctctgtcctgccgccatggtgagaagtggaagctacataagcttttctgggcattgagtacaacaaatttagttgctgctggttgtttctcagccagatctataagtttggacctaaaactgtaggtagttgaactttacatgggctcagtcttcctttaaatctttgactatattccaagttgtagtttcgctgtctttcataaaaaagtaatattacttttagaaattggactctatgactaaaccttatttttctcttcatttaagtttccttcagcattcgagtttaatgagctattcttgattacaattttggatcacctttatagctgtctttttgggacctttttgtgcaactgtgaacagcagcgattcaaagaggatgtatatacaaagacgatatctttatggtcgtatatcaatagccagctagacgagttttctaatcccttctttgtgaattatg

SEQ ID NO: 11475 - protein, 73 aa, Homo sapiens
TLFFSSFKFPSAFEFNELFLITILDHLYSCLFGTFLCNCEQQRFKEDVYTKTISLWSYINSQLDEFSNPFFVN

SEQ ID NO: 11476 - DNA, 2585 bp, Homo sapiens
ggtaggaggatggcctgataatgcagctttgtctctgctccctccagatgcccattcaccagaatctcaaggagctgctggccgtcagggcggagctgcagaagcgtgtggagggcctacagcgggaggtggccacgcgcgccgtctcatcctcatctgagcggggctcctcgccctcccactccgccacctccgtccacacctcggtctgatgggcgaggtcagcctgctgctccactgtctcccggtggctcaggaaagggacctggcgatcactgttatggctgtagcttgtgatcttgtcttttaggattaggcccagggaccatttgtgtggctaggtgacagctcccactgttggcaaccgttaccctcctgtcagcggtttcacaggggagccgtctgtcacgcccaccctgtgaagcaacttctggcattcaggcagcttgggagaaactaagtgaacggaatgcagtactgaggttcaagaaagctgtacgccatttctttccaacttaaatccttcagtaacaacaaacaccactcacttcaagatgcattgccagccccgtggcttccctcagctcttggccacaacttgaaaactgtcttgaatgaagtacttggggagaagacaggccactgccctctgttccacagttttcttcatgcacggggtcctcctgttaacaattactgttgtgtacatataaggtatttttagagaagagaaacaggcctttattttcctatgtccttttttacgtttagaatagtcacccgaggggggatcagctcaactgtactgtgggagaaattcttttccaacaaacctcatgctcgtttttctgtggtgcaatttcaagggcaacgtgttctgtcctcacctcactctggtactcgcctcttggggcggctcagcccattcatggggatggcaccaagcggccatgctcagtcttccagccccgctgagggtaaaccgaggcctctggcagctgtgcacaggtgctggcctctggctccttcaaggagcactgcctgtcactcgctcctgggctgtctagccatgtctcccacccccactttaccgcagccagctgctgggatcaaagcaagtctgttcttatgttatttgcctgtatgaaatcatttctcattttatcacaattccttcaactcagcttactcgcgtggctgcctgttcatatttgaaagcagccaccgtgctgtggctttggtttggaaaagcatagcacgcacttcccttggttttcccttcccagagccgaccgcagctggtcagccctctcttcccgctcctgaacctttacttactgactttgagctctgtgactccgtcggttctcgcaggaattaactaacttaccaattggttcaatccacttgagcgccatagctctgagctcctctgtgtgacatgccacagatgactattgcacacctgggtcctgccccagcaggccatgcccctcccatgtgccgtgcctgttgctgcagctgcccccccaccccgccactggctgcaggaattcagcctttagaggcagaggcagctgcagcggcccctgaggtcaaaccccagtgtgactgcatagcagtgttagctggttggtttcaaactactggattccaggcaaaggcctacagattgaccttattatttttgaaaatatgttaagggttttttcgtagagagagaaagaatggatttttttttaactgggaacctcctgattcttacggaaaattatccttctataagaagataccagagagatttattcaaggtaatttgataacctaaaatcaattctccattttttatcatatgtgggatttgttgctaagtcgtgttcaacaatagcttttatgttcctaacatatctgaaagcttatttatgaatggatatactggattattgatatactgattttttttttaatggggacatttgccattttcttcccagaaatatgtaatcccctggctgactaggactgttaaacatagtgtggactggatgatgccttcgacaaaccagagaagccaagttggggggagctggtgcctggagtgggccctgtgcacctcacctggcggaggctggggggggctctgtcagcaggaccctagaggagactctcattcgattttaaagaagcacaacgggtcattttcctttgtatgttcctagcgcagaactgtttctaaaacaacttgaagtatagttttgttatctaagcaatttttgttttaagtaagtaagtgtactagaatgcgaagccgttatggttcaggtttttaaaaactggtacagtattgtatttgtctcatctgttgcactgtatttcaatcatctgtaattaaaatgatcatatgtttgctccctggtcttttttaagtaagtaagtaagtatcttagtagatttttcctttgaggaaaatcggtaataaaataacatggattgaatgtttactgtgcgtcaagcacagttaatatatgatgatgtaaagtaactaactttatgtgatttaattcattcagtaaattgtaaatgta

SEQ ID NO: 11477 - protein, 131 aa, Homo sapiens [sequence omitted]

SEQ ID NO: 11478 - DNA, 1215 bp, Homo sapiens
cacatgctagggtctagggcccctgtctactgatagtcagtttgctgtgtcagaaagcacttctgaaagcagatatgagtcaccagacaggcaggatcttacaaaactcacgggcctctttggtctgcatgatggccccatgcgtttcataggctgtccactgagcgggattgtctgctgagtgggatgagccaactccagtttcttaaggaaaccactggaatctgcagcccccacatgcatctgtctaacgcatgcctcgtgttcgttttgcaaacatgcctgtggtggagggtggtcagttgtagccctgtgcgtctcaaggctgccttgtgaggccattcccagtgcgtgcccttgagctccttaccaccccttttcctgctcggccctttaatccctgacagacctggactgtgtggctgaagggggacctgcagcactgcagaaatgcctctgcgtggtgccatgaaggaaagaaaccttggcctggtctcgagaagcttcccatgcttcaggaagttagtaagggtggggtggcttgcaggattggcctgtttccagggcctcccacactcattggccagattgtgaactttgtcaggcttgtccctccctgataccaagtatgtcgagaaccgatggccccaccctctggctggtgctgggccggaggtggctatggaggattttggcatgcgtggcctgtcgccacctggacagcgtgacctcaggggttgtccactttacctttatggtgaggcctgtcggatggctaagtccttgaaaccctagagctgtgacgtagaatatgtgctgtctgtgagaccgtgttcccaggagcactgactgcagttgagagagacccattttgctctcccttaccgccccccgccccgggtgctttctgcacaaagcctagagcctggcactcaagcccaccggtggcagctcctagtgactggacatgcctggaagacccctcagccttctgtttgcagaacgttcatttcaggagtgtgcgtggcttctggggtgggacccagaggggaggctctgggacaggggctggggttcagtgccagggccctgaggaagaaatggggactgatctcaaaattccagaattccctgtacatctgttcacgtgcttgtgtccaggtgtgacttgtaaactgtctagtgtttgcattaaataaaatggcaccgagcaga

SEQ ID NO: 11479 - protein, 41 aa, Homo sapiens
MPGRPLSLLFAERSFQECAWLLGWDPEGRLWDRGWGSVPGP

SEQ ID NO: 11480 - DNA, 1141 bp, Homo sapiens
ctgtcccggtgagctctgttgtcagaggctcacgggacagaaccacatgctagggtctagggcccctgtctactgatagtcagtttgctgtgtcagaaagcacttctgaaagcagatatgagtcaccagacaggcaggatcttacaaaactcacgggcctctttggtctgcatgatggccccatgcgtttcataggctgtccactgagcgggattgtctgctgagtgggatgagccaactccagtttcttaaggaaaccactggaatctgcagcccccacatgcatctgtctaacgcatgcctcgtgttcgttttgcaaacatgcctgtggtggagggtggtcagttgtagccctgtgcgtctcaaggctgccttgtgaggccattcccagtgcgtgcccttgagctccttaccaccccttttcctgctcggccctttaatccctgacagacctggactgtgtggctgaagggggacctgcagcactgcagaaatgcctctgcgtggtgccatgaaggaaagaaaccttggcctggtctcgagaagcttcccatgcttcaggaagttagtaagggtggggtggcttgcaggattggcctgtttccagggcctcccacactcattggccagattgtgaactttgtcaggcttgtccctccctgataccaagtatgtcgagaaccgatggccccaccctctggctggtgctgggccggaggtggctatggaggattttggcatgcgtggcctgtcgccacctggacagcgtgacctcaggggttgtccactttacctttatggtgaggcctgtcggatggctaagtccttgaaaccctagagctgtgacgtagaatatgtgctgtctgtgagaccgtgttcccaggagcactgactgcagttgagagagacccattttgctctcccttaccgccccccgccccgggtgtgcgtggcttctggggtgggacccagaggggaggctctgggacaggggctggggttcagtgccagggccctgaggaagaaatggggactgatctcaaaattccagaattccctgtacatctgttcacgtgcttgtgtccaggtgtgacttgtaaactgtctagtgtttgcattaaataaaatggcaccgagcaga

SEQ ID NO: 11481 - protein, 52 aa, Homo sapiens
MSRTDGPTLWLVLGRRWLWRILACVACRHLDSVTSGVVHFTFMVRPVGWLSP

SEQ ID NO: 11482 - DNA, 940 bp, Homo sapiens
aggtgactttgtagctctgtggtcagcctacttgtctgctctgagggagagtgcgtggggagccatgctcaccgtggcaaacacaggaaccccatgactcgcccctcacctggcgtggagctgcctggtttgggctggagcagagctggtttcctggaatgttcctttggcccacatatggttctgtcccggtgagctctgttgtcagaggctcacgggacagaaccacatgctagggtctagggcccctgtctactgatagtcagtttgctgtgtcagaaagcacttctgaaagcagatatgagtcaccagacaggcaggatcttacaaaactcacgggcctctttggtctgcatgatggccccatgcgtttcataggctgtccactgagcgggattgtctgctgagtgggatgagccaactccagtttcttaaggaaaccactggaatctgcagcccccacatgcatctgtctaacgcatgcctcgtgttcgttttgcaaacatgcctgtggtggagggtggtcagttgtagccctgtgcgtctcaaggctgccttgtgaggccattcccagtgcgtgcccttgagctccttaccaccccttttcctgctcggccctttaatccctgacagacctggactgtgtggctgaagggggacctgcagcactgcagaaatgcctctgcgtggtgccatgaaggaaagaaaccttggcctggtctcgagaagcttcccatgcttcaggaagttagtaagggtggggtggcttgcaggattggctctgggacaggggctggggttcagtgccagggccctgaggaagaaatggggactgatctcaaaattccagaattccctgtacatctgttcacgtgcttgtgtccaggtgtgacttgtaaactgtctagtgtttgcattaaataaaatggcaccgagcaga

SEQ ID NO: 11483 - protein, 71 aa, Homo sapiens
MPLRGAMKERNLGLVSRSFPCFRKLVRVGWLAGLALGQGLGFSARALRKKWGLISKFQNSLYICSRACVQV

SEQ ID NO: 11484 - DNA, 667 bp, Homo sapiens
cccctagtgaaatactccacgttgcacacgcagtctgcagagccgccgccgccgcccgaaccagcccggatctgagggccctgtccagctgcaggcatgcacaatggtgccaccgcttgtcacccggctccccccaccccttcatttggacccgcagctgctgtgctgctctgtgccatcggctccttgttggtctgagtttcccggatgagctctgggtgtttgtgagtttggtttctctgccctgccccaagcgtgctgagacttggtgccgaaattcaagagccagctctgatagaaagccagcaccagcctcgggagctgctgagccaccaactcccaaagccagcctgcctccagctttactgagcacaggatgcgggggccaagatgatgctgaggcctgatgacatttatgcttaggggacaagagtttgaatcaaggaaagataaagctgggcggaaggaggtgtgcgtggcttctggggtgggacccagaggggaggctctgggacaggggctggggttcagtgccagggccctgaggaagaaatggggactgatctcaaaattccagaattccctgtacatctgttcacgtgcttgtgtccaggtgtgacttgtaaactgtctagtgtttgcattaaataaaatggcaccgagcaga

SEQ ID NO: 11485 - protein, 70 aa, Homo sapiens
MTFMLRGQEFESRKDKAGRKEVCVASGVGPRGEALGQGLGFSARALRKKWGLISKFQNSLYICSRACVQV

SEQ ID NO: 11486 - DNA, 2904 bp, Homo sapiens
gaggacgatgatgagaactcctgggcagtgaattctgggacgaacagtcttcatccggataaggatgttcagagggtctcaacgcagactacgtgaagggagagaacctggaagccgtggtatgtgaggaaccccaagtgaaatactccacgttgcacacgcagtctgcagagccgccgccgccgcccgaaccagcccggatctgagggccctgtccagctgcaggcatgcacaatggtgccaccgcttgtcacccggctccccccaccccttcatttggacccgcagctgctgtgctgctctgtgccatcggctccttgttggtctgagtttcccggatgagctctgggtgtttgtgagtttggtttctctgccctgccccaagcgtgctgagacttggtgccgaaattcaagagccagctctgatagaaagccagcaccagcctcgggagctgctgagccaccaactcccaaagccagcctgcctccagctttactgagcacaggatgcgggggccaagatgatgctgaggcctgatgacatttatgcttaggggacaagagtttgaactcaagggactgtgacccctgcacactggagtggctcattgtggcaggtttctgccaatagacagcccctgacagtggcctcaaggagctgcaggtggggggctcagcctgcacccacttggagcccctgcaaggagcgaaccggtcagcaccaagtaacaccacacacacgcagcacccaggatgatggtttcacttcagtcttccccatcccaggttttatgttgctgggcttccggagagccggtccaagcggaggctttcagtgatttaagtacaaacatgcatctcgtgatagtcctgccttgagagcttaggaatcttccggataagtatgaagcaattcgtaggcctgtttcccatctgattccatagggggctgggtgtggccttcgggttgacatgagaaaggtctttagcaatcatttctgcaccggagatgagttttatcctgtgttggggagaggtgctcaccctccaccctgtgtccctgttttggtagcaagagtgaccgatgtcaagaacgagcatcaaagccagaatcctgcttgtttgcttaaaaatgtaattgggggcggcgggggaggagaggggaaagagacattcgcttggtttagtgaaacgcaggtgactttgtagctctgtggtcagcctacttgtctgctctgagggagagtgcgtggggagccatgctcaccgtggcaaacacaggaaccccatgactcgcccctcacctggcgtggagctgcctggtttgggctggagcagagctggtttcctggaatgttcctttggcccacatatggttctgtcccggtgagctctgttgtcagaggctcacgggacagaaccacatgctagggtctagggcccctgtctactgatagtcagtttgctgtgtcagaaagcacttctgaaagcagatatgagtcaccagacaggcaggatcttacaaaactcacgggcctctttggtctgcatgatggccccatgcgtttcataggctgtccactgagcgggattgtctgctgagtgggatgagccaactccagtttcttaaggaaaccactggaatctgcagcccccacatgcatctgtctaacgcatgcctcgtgttcgttttgcaaacatgcctgtggtggagggtggtcagttgtagccctgtgcgtctcaaggctgccttgtgaggccattcccagtgcgtgcccttgagctccttaccaccccttttcctgctcggccctttaatccctgacagacctggactgtgtggctgaagggggacctgcagcactgcagaaatgcctctgcgtggtgccatgaaggaaagaaaccttggcctggtctcgagaagcttcccatgcttcaggaagttagtaagggtggggtggcttgcaggattggcctgtttccagggcctcccacactcattggccagattgtgaactttgtcaggcttgtccctccctgataccaagtatgtcgagaaccgatggccccaccctctggctggtgctgggccggaggtggctatggaggattttggcatgcgtggcctgtcgccacctggacagcgtgacctcaggggttgtccactttacctttatggtgaggcctgtcggatggctaagtccttgaaaccctagagctgtgacgtagaatatgtgctgtctgtgagaccgtgttcccaggagcactgactgcagttgagagagacccattttgctctcccttaccgccccccgccccgggtgctttctgcacaaagcctagagcctggcactcaagcccaccggtggcagctcctagtgactggacatgcctggaagacccctcagccttctgtttgcagaacgttcatttcaggagcttctccttcccacagacatcttacacttgctcgacactgccacctgcagaagcctggcgggctctggtcaccatgtgtctatctgaaggttgcactggccagcatgggcctgtcccaagcgagaggggagacacagtggactgaaaggactggttgaaagtggccaatctctatcagcttaatttggcagagaaaatttgtaacaactctgagcacatgctgggtgaagtcacagctcaaggaaagataaagctgggcggaaggaggtgtgcgtggcttctggggtgggacccagaggggaggctctgggacaggggctggggttcagtgccagggccctgaggaagaaatggggactgatctcaaaattccagaattccctgtacatctgttcacgtgcttgtgtccaggtgtgacttgtaaactgtctagtgtttgcattaaataaaatggcaccgagcaga

SEQ ID NO: 11487 - protein, 78 aa, Homo sapiens [sequence omitted]

SEQ ID NO: 11488 - DNA, 4114 bp, Homo sapiens
ctgatgcgtgtgagaggatgccacctgccagacactctgtccccaggctggatgtggcaggggtggggggagagttgaggtgccatggtgaggactcaggtgcccactggtggtcatgcctggggagcacatagagggccacccacaggaaggagacgatccagcgcccactgggttggcagctagcagtgatcacgaggctcagggtgtgtctcctggcccccacctgtcagctgggaaggtgcacctggggcagcttccactgcactcatcacctgccccgctctgcgtggggccggccacacctgccaaagagcaacgcccgcatttgccacaggcccatttggctcccacctcaagcccagcagccaccggggcaggcaggtggtgggcattcttgtttaggcaaggagcctgtagcccaggacgatggcttgacttgcactggtgcctggtcggtcggtcggtcggttggaaccatgccccagttttcccacagacccggggctgaagggttccagtccctgtgctacgcagggatgagacacagactcttgactctctgcaagcagcagcaggggtggggtccactctaagaacttgaacactggcccttgctggcgggagggaatgcttggtacagtccccgaatccctcttgtaacaggtgtagagaaagcctagataactaactagactgaagcagctgctggtgggctggcccctccaagctcaggtggacacagcggttattcctgctgctgggaggagcagttggcctccgcgcgggtgttgctgggaggctgcatgttggcaggaggctttgctgcatctacatgctgagccccactcagccatccgcccctccctgccctgcatccatcaatcactcatagcgattggctccctggcccccgggccgcacacgcacacggacctgtggatggtgctgagccctgccatcgggcgccccctccactgggcggagctgccgtcttgacgcggtggcagctgccctatgaggatggagtgccggaagccttcgctgcatgtcgttgttatttctgaggacgatgatgagaactcctgggcagtgaattctgggacgaacagtcttcatccggataaggatgttcaggtggctcagggtgcagggttttgagttccccaggggagctgtgctgcttttttagctgcagaggacttggtcaggagttctcagtcacgattggggacccttaggtcctgtgcgcatcactaactctgcccttttccctttgcagagggtctcaacgcagactacgtgaagggagagaacctggaagccgtggtatgtgaggaaccccaagtgaaatactccacgttgcacacgcagtctgcagagccgccgccgccgcccgaaccagcccggatctgagggccctgtccagctgcaggcatgcacaatggtgccaccgcttgtcacccggctccccccaccccttcatttggacccgcagctgctgtgctgctctgtgccatcggctccttgttggtctgagtttcccggatgagctctgggtgtttgtgagtttggtttctctgccctgccccaagcgtgctgagacttggtgccgaaattcaagagccagctctgatagaaagccagcaccagcctcgggagctgctgagccaccaactcccaaagccagcctgcctccagctttactgagcacaggatgcgggggccaagatgatgctgaggcctgatgacatttatgcttaggggacaagagtttgaactcaagggactgtgacccctgcacactggagtggctcattgtggcaggtttctgccaatagacagcccctgacagtggcctcaaggagctgcaggtggggggctcagcctgcacccacttggagcccctgcaaggagcgaaccggtcagcaccaagtaacaccacacacacgcagcacccaggatgatggtttcacttcagtcttccccatcccaggttttatgttgctgggcttccggagagccggtccaagcggaggctttcagtgatttaagtacaaacatgcatctcgtgatagtcctgccttgagagcttaggaatcttccggataagtatgaagcaattcgtaggcctgtttcccatctgattccatagggggctgggtgtggccttcgggttgacatgagaaaggtctttagcaatcatttctgcaccggagatgagttttatcctgtgttggggagaggtgctcaccctccaccctgtgtccctgttttggtagcaagagtgaccgatgtcaagaacgagcatcaaagccagaatcctgcttgtttgcttaaaaatgtaattgggggcggcgggggaggagaggggaaagagacattcgcttggtttagtgaaacgcaggtgactttgtagctctgtggtcagcctacttgtctgctctgagggagagtgcgtggggagccatgctcaccgtggcaaacacaggaaccccatgactcgcccctcacctggcgtggagctgcctggtttgggctggagcagagctggtttcctggaatgttcctttggcccacatatggttctgtcccggtgagctctgttgtcagaggctcacgggacagaaccacatgctagggtctagggcccctgtctactgatagtcagtttgctgtgtcagaaagcacttctgaaagcagatatgagtcaccagacaggcaggatcttacaaaactcacgggcctctttggtctgcatgatggccccatgcgtttcataggctgtccactgagcgggattgtctgctgagtgggatgagccaactccagtttcttaaggaaaccactggaatctgcagcccccacatgcatctgtctaacgcatgcctcgtgttcgttttgcaaacatgcctgtggtggagggtggtcagttgtagccctgtgcgtctcaaggctgccttgtgaggccattcccagtgcgtgcccttgagctccttaccaccccttttcctgctcggccctttaatccctgacagacctggactgtgtggctgaagggggacctgcagcactgcagaaatgcctctgcgtggtgccatgaaggaaagaaaccttggcctggtctcgagaagcttcccatgcttcaggaagttagtaagggtggggtggcttgcaggattggcctgtttccagggcctcccacactcattggccagattgtgaactttgtcaggcttgtccctccctgataccaagtatgtcgagaaccgatggccccaccctctggctggtgctgggccggaggtggctatggaggattttggcatgcgtggcctgtcgccacctggacagcgtgacctcaggggttgtccactttacctttatggtgaggcctgtcggatggctaagtccttgaaaccctagagctgtgacgtagaatatgtgctgtctgtgagaccgtgttcccaggagcactgactgcagttgagagagacccattttgctctcccttaccgccccccgccccgggtgctttctgcacaaagcctagagcctggcactcaagcccaccggtggcagctcctagtgactggacatgcctggaagacccctcagccttctgtttgcagaacgttcatttcaggagcttctccttcccacagacatcttacacttgctcgacactgccacctgcagaagcctggcgggctctggtcaccatgtgtctatctgaaggttgcactggccagcatgggcctgtcccaagcgagaggggagacacagtggactgaaaggactggttgaaagtggccaatctctatcagcttaatttggcagagaaaatttgtaacaactctgagcacatgctgggtgaagtcacagctcaaggaaagataaagctgggcggaaggaggtgtgcgtggcttctggggtgggacccagaggggaggctctgggacaggggctggggttcagtgccagggccctgaggaagaaatggggactgatctcaaaattccagaattccctgtacatctgttcacgtgcttgtgtccaggtgtgacttgtaaactgtctagtgtttgcattaaataaaatggcaccgagcaga

SEQ ID NO: 11489 - protein, 131 aa, Homo sapiens
MPGEHIEGHPQEGDDPAPTGLAASSDHEAQGVSPGPHLSAGKVHLGQLPLHSSPAPLCVGPATPAKEQRPHLPQAHLAPTSSPAATGAGRWWAFLFRQGACSPGRWLDLHWCLVGRSVGWNHAPVFPQTRG

SEQ ID NO: 11490 - DNA, 2955 bp, Homo sapiens
caggcatggtggcagagcctggcaccattgccggggtggccagcgccctggccatggccctcatcggtgccgtctccagctacatctcctaccagcagaagaagttctgcttcagcattcagcagggtctcaacgcagactacgtgaagggagagaacctggaagccgtggtatgtgaggaaccccaagtgaaatactccacgttgcacacgcagtctgcagagccgccgccgccgcccgaaccagcccggatctgagggccctgtccagctgcaggcatgcacaatggtgccaccgcttgtcacccggctccccccaccccttcatttggacccgcagctgctgtgctgctctgtgccatcggctccttgttggtctgagtttcccggatgagctctgggtgtttgtgagtttggtttctctgccctgccccaagcgtgctgagacttggtgccgaaattcaagagccagctctgatagaaagccagcaccagcctcgggagctgctgagccaccaactcccaaagccagcctgcctccagctttactgagcacaggatgcgggggccaagatgatgctgaggcctgatgacatttatgcttaggggacaagagtttgaactcaagggactgtgacccctgcacactggagtggctcattgtggcaggtttctgccaatagacagcccctgacagtggcctcaaggagctgcaggtggggggctcagcctgcacccacttggagcccctgcaaggagcgaaccggtcagcaccaagtaacaccacacacacgcagcacccaggatgatggtttcacttcagtcttccccatcccaggttttatgttgctgggcttccggagagccggtccaagcggaggctttcagtgatttaagtacaaacatgcatctcgtgatagtcctgccttgagagcttaggaatcttccggataagtatgaagcaattcgtaggcctgtttcccatctgattccatagggggctgggtgtggccttcgggttgacatgagaaaggtctttagcaatcatttctgcaccggagatgagttttatcctgtgttggggagaggtgctcaccctccaccctgtgtccctgttttggtagcaagagtgaccgatgtcaagaacgagcatcaaagccagaatcctgcttgtttgcttaaaaatgtaattgggggcggcgggggaggagaggggaaagagacattcgcttggtttagtgaaacgcaggtgactttgtagctctgtggtcagcctacttgtctgctctgagggagagtgcgtggggagccatgctcaccgtggcaaacacaggaaccccatgactcgcccctcacctggcgtggagctgcctggtttgggctggagcagagctggtttcctggaatgttcctttggcccacatatggttctgtcccggtgagctctgttgtcagaggctcacgggacagaaccacatgctagggtctagggcccctgtctactgatagtcagtttgctgtgtcagaaagcacttctgaaagcagatatgagtcaccagacaggcaggatcttacaaaactcacgggcctctttggtctgcatgatggccccatgcgtttcataggctgtccactgagcgggattgtctgctgagtgggatgagccaactccagtttcttaaggaaaccactggaatctgcagcccccacatgcatctgtctaacgcatgcctcgtgttcgttttgcaaacatgcctgtggtggagggtggtcagttgtagccctgtgcgtctcaaggctgccttgtgaggccattcccagtgcgtgcccttgagctccttaccaccccttttcctgctcggccctttaatccctgacagacctggactgtgtggctgaagggggacctgcagcactgcagaaatgcctctgcgtggtgccatgaaggaaagaaaccttggcctggtctcgagaagcttcccatgcttcaggaagttagtaagggtggggtggcttgcaggattggcctgtttccagggcctcccacactcattggccagattgtgaactttgtcaggcttgtccctccctgataccaagtatgtcgagaaccgatggccccaccctctggctggtgctgggccggaggtggctatggaggattttggcatgcgtggcctgtcgccacctggacagcgtgacctcaggggttgtccactttacctttatggtgaggcctgtcggatggctaagtccttgaaaccctagagctgtgacgtagaatatgtgctgtctgtgagaccgtgttcccaggagcactgactgcagttgagagagacccattttgctctcccttaccgccccccgccccgggtgctttctgcacaaagcctagagcctggcactcaagcccaccggtggcagctcctagtgactggacatgcctggaagacccctcagccttctgtttgcagaacgttcatttcaggagcttctccttcccacagacatcttacacttgctcgacactgccacctgcagaagcctggcgggctctggtcaccatgtgtctatctgaaggttgcactggccagcatgggcctgtcccaagcgagaggggagacacagtggactgaaaggactggttgaaagtggccaatctctatcagcttaatttggcagagaaaatttgtaacaactctgagcacatgctgggtgaagtcacagctcaaggaaagataaagctgggcggaaggaggtgtgcgtggcttctggggtgggacccagaggggaggctctgggacaggggctggggttcagtgccagggccctgaggaagaaatggggactgatctcaaaattccagaattccctgtacatctgttcacgtgcttgtgtccaggtgtgacttgtaaactgtctagtgtttgcattaaataaaatggcaccgagcaga

SEQ ID NO: 11491 - protein, 83 aa, Homo sapiens [sequence omitted]

SEQ ID NO: 11492 - DNA, 3155 bp, Homo sapiens
gtgctcctccggggccctccgcctgctcccagccatggtggcctggcgctcggcgttccttgtctgcctcgctttctccttggccaccctggtccagcgaggatctggggactttgatgattttaacctggaggatgcagtgaaagaaacttcctcagtaaagcgtgatggccggtacggcagcaatgacgaccctggatctggcatggtggcagagcctggcaccattgccggggtggccagcgccctggccatggccctcatcggtgccgtctccagctacatctcctaccagcagaagaagttctgcttcagcattcagcagggtctcaacgcagactacgtgaagggagagaacctggaagccgtggtatgtgaggaaccccaagtgaaatactccacgttgcacacgcagtctgcagagccgccgccgccgcccgaaccagcccggatctgagggccctgtccagctgcaggcatgcacaatggtgccaccgcttgtcacccggctccccccaccccttcatttggacccgcagctgctgtgctgctctgtgccatcggctccttgttggtctgagtttcccggatgagctctgggtgtttgtgagtttggtttctctgccctgccccaagcgtgctgagacttggtgccgaaattcaagagccagctctgatagaaagccagcaccagcctcgggagctgctgagccaccaactcccaaagccagcctgcctccagctttactgagcacaggatgcgggggccaagatgatgctgaggcctgatgacatttatgcttaggggacaagagtttgaactcaagggactgtgacccctgcacactggagtggctcattgtggcaggtttctgccaatagacagcccctgacagtggcctcaaggagctgcaggtggggggctcagcctgcacccacttggagcccctgcaaggagcgaaccggtcagcaccaagtaacaccacacacacgcagcacccaggatgatggtttcacttcagtcttccccatcccaggttttatgttgctgggcttccggagagccggtccaagcggaggctttcagtgatttaagtacaaacatgcatctcgtgatagtcctgccttgagagcttaggaatcttccggataagtatgaagcaattcgtaggcctgtttcccatctgattccatagggggctgggtgtggccttcgggttgacatgagaaaggtctttagcaatcatttctgcaccggagatgagttttatcctgtgttggggagaggtgctcaccctccaccctgtgtccctgttttggtagcaagagtgaccgatgtcaagaacgagcatcaaagccagaatcctgcttgtttgcttaaaaatgtaattgggggcggcgggggaggagaggggaaagagacattcgcttggtttagtgaaacgcaggtgactttgtagctctgtggtcagcctacttgtctgctctgagggagagtgcgtggggagccatgctcaccgtggcaaacacaggaaccccatgactcgcccctcacctggcgtggagctgcctggtttgggctggagcagagctggtttcctggaatgttcctttggcccacatatggttctgtcccggtgagctctgttgtcagaggctcacgggacagaaccacatgctagggtctagggcccctgtctactgatagtcagtttgctgtgtcagaaagcacttctgaaagcagatatgagtcaccagacaggcaggatcttacaaaactcacgggcctctttggtctgcatgatggccccatgcgtttcataggctgtccactgagcgggattgtctgctgagtgggatgagccaactccagtttcttaaggaaaccactggaatctgcagcccccacatgcatctgtctaacgcatgcctcgtgttcgttttgcaaacatgcctgtggtggagggtggtcagttgtagccctgtgcgtctcaaggctgccttgtgaggccattcccagtgcgtgcccttgagctccttaccaccccttttcctgctcggccctttaatccctgacagacctggactgtgtggctgaagggggacctgcagcactgcagaaatgcctctgcgtggtgccatgaaggaaagaaaccttggcctggtctcgagaagcttcccatgcttcaggaagttagtaagggtggggtggcttgcaggattggcctgtttccagggcctcccacactcattggccagattgtgaactttgtcaggcttgtccctccctgataccaagtatgtcgagaaccgatggccccaccctctggctggtgctgggccggaggtggctatggaggattttggcatgcgtggcctgtcgccacctggacagcgtgacctcaggggttgtccactttacctttatggtgaggcctgtcggatggctaagtccttgaaaccctagagctgtgacgtagaatatgtgctgtctgtgagaccgtgttcccaggagcactgactgcagttgagagagacccattttgctctcccttaccgccccccgccccgggtgctttctgcacaaagcctagagcctggcactcaagcccaccggtggcagctcctagtgactggacatgcctggaagacccctcagccttctgtttgcagaacgttcatttcaggagcttctccttcccacagacatcttacacttgctcgacactgccacctgcagaagcctggcgggctctggtcaccatgtgtctatctgaaggttgcactggccagcatgggcctgtcccaagcgagaggggagacacagtggactgaaaggactggttgaaagtggccaatctctatcagcttaatttggcagagaaaatttgtaacaactctgagcacatgctgggtgaagtcacagctcaaggaaagataaagctgggcggaaggaggtgtgcgtggcttctggggtgggacccagaggggaggctctgggacaggggctggggttcagtgccagggccctgaggaagaaatggggactgatctcaaaattccagaattccctgtacatctgttcacgtgcttgtgtccaggtgtgacttgtaaactgtctagtgtttgcattaaataaaatggcaccgagcaga

SEQ ID NO: 11493 - protein, 140 aa, Homo sapiens
MVAWRSAFLVCLAFSLATLVQRGSGDFDDFNLEDAVKETSSVKRDGRYGSNDDPGSGMVAEPGTIAGVASALAMALIGAVSSYISYQQKKFCFSIQQGLNADYVKGENLEAVVCEEPQVKYSTLHTQSAEPPPPPEPARI

SEQ ID NO: 11494 - DNA, 3218 bp, Homo sapiens
gtgctcctccggggccctccgcctgctcccagccatggtggcctggcgctcggcgttccttgtctgcctcgctttctccttggccaccctggtccagcgaggatctggggactttgatgattttaacctggaggatgcagtgaaagaaacttcctcagtaaagcgatcactgtaaggatgacatgggaggagccatgtgaagcactcagcacagtccttggaacaaggtgatggccggtacggcagcaatgacgaccctggatctggcatggtggcagagcctggcaccattgccggggtggccagcgccctggccatggccctcatcggtgccgtctccagctacatctcctaccagcagaagaagttctgcttcagcattcagcagggtctcaacgcagactacgtgaagggagagaacctggaagccgtggtatgtgaggaaccccaagtgaaatactccacgttgcacacgcagtctgcagagccgccgccgccgcccgaaccagcccggatctgagggccctgtccagctgcaggcatgcacaatggtgccaccgcttgtcacccggctccccccaccccttcatttggacccgcagctgctgtgctgctctgtgccatcggctccttgttggtctgagtttcccggatgagctctgggtgtttgtgagtttggtttctctgccctgccccaagcgtgctgagacttggtgccgaaattcaagagccagctctgatagaaagccagcaccagcctcgggagctgctgagccaccaactcccaaagccagcctgcctccagctttactgagcacaggatgcgggggccaagatgatgctgaggcctgatgacatttatgcttaggggacaagagtttgaactcaagggactgtgacccctgcacactggagtggctcattgtggcaggtttctgccaatagacagcccctgacagtggcctcaaggagctgcaggtggggggctcagcctgcacccacttggagcccctgcaaggagcgaaccggtcagcaccaagtaacaccacacacacgcagcacccaggatgatggtttcacttcagtcttccccatcccaggttttatgttgctgggcttccggagagccggtccaagcggaggctttcagtgatttaagtacaaacatgcatctcgtgatagtcctgccttgagagcttaggaatcttccggataagtatgaagcaattcgtaggcctgtttcccatctgattccatagggggctgggtgtggccttcgggttgacatgagaaaggtctttagcaatcatttctgcaccggagatgagttttatcctgtgttggggagaggtgctcaccctccaccctgtgtccctgttttggtagcaagagtgaccgatgtcaagaacgagcatcaaagccagaatcctgcttgtttgcttaaaaatgtaattgggggcggcgggggaggagaggggaaagagacattcgcttggtttagtgaaacgcaggtgactttgtagctctgtggtcagcctacttgtctgctctgagggagagtgcgtggggagccatgctcaccgtggcaaacacaggaaccccatgactcgcccctcacctggcgtggagctgcctggtttgggctggagcagagctggtttcctggaatgttcctttggcccacatatggttctgtcccggtgagctctgttgtcagaggctcacgggacagaaccacatgctagggtctagggcccctgtctactgatagtcagtttgctgtgtcagaaagcacttctgaaagcagatatgagtcaccagacaggcaggatcttacaaaactcacgggcctctttggtctgcatgatggccccatgcgtttcataggctgtccactgagcgggattgtctgctgagtgggatgagccaactccagtttcttaaggaaaccactggaatctgcagcccccacatgcatctgtctaacgcatgcctcgtgttcgttttgcaaacatgcctgtggtggagggtggtcagttgtagccctgtgcgtctcaaggctgccttgtgaggccattcccagtgcgtgcccttgagctccttaccaccccttttcctgctcggccctttaatccctgacagacctggactgtgtggctgaagggggacctgcagcactgcagaaatgcctctgcgtggtgccatgaaggaaagaaaccttggcctggtctcgagaagcttcccatgcttcaggaagttagtaagggtggggtggcttgcaggattggcctgtttccagggcctcccacactcattggccagattgtgaactttgtcaggcttgtccctccctgataccaagtatgtcgagaaccgatggccccaccctctggctggtgctgggccggaggtggctatggaggattttggcatgcgtggcctgtcgccacctggacagcgtgacctcaggggttgtccactttacctttatggtgaggcctgtcggatggctaagtccttgaaaccctagagctgtgacgtagaatatgtgctgtctgtgagaccgtgttcccaggagcactgactgcagttgagagagacccattttgctctcccttaccgccccccgccccgggtgctttctgcacaaagcctagagcctggcactcaagcccaccggtggcagctcctagtgactggacatgcctggaagacccctcagccttctgtttgcagaacgttcatttcaggagcttctccttcccacagacatcttacacttgctcgacactgccacctgcagaagcctggcgggctctggtcaccatgtgtctatctgaaggttgcactggccagcatgggcctgtcccaagcgagaggggagacacagtggactgaaaggactggttgaaagtggccaatctctatcagcttaatttggcagagaaaatttgtaacaactctgagcacatgctgggtgaagtcacagctcaaggaaagataaagctgggcggaaggaggtgtgcgtggcttctggggtgggacccagaggggaggctctgggacaggggctggggttcagtgccagggccctgaggaagaaatggggactgatctcaaaattccagaattccctgtacatctgttcacgtgcttgtgtccaggtgtgacttgtaaactgtctagtgtttgcattaaataaaatggcaccgagcaga

SEQ ID NO: 11495 - protein, 83 aa, Homo sapiens [sequence omitted]

SEQ ID NO: 11496 - DNA, 2496 bp, Homo sapiens
aactgtgctcctccggggccctccgcctgctcccacctcgggagctgctgagccaccaactcccaaagccagcctgcctccagctttactgagcacaggatgcgggggccaagatgatgctgaggcctgatgacatttatgcttaggggacaagagtttgaactcaagggactgtgacccctgcacactggagtggctcattgtggcaggtttctgccaatagacagcccctgacagtggcctcaaggagctgcaggtggggggctcagcctgcacccacttggagcccctgcaaggagcgaaccggtcagcaccaagtaacaccacacacacgcagcacccaggatgatggtttcacttcagtcttccccatcccaggttttatgttgctgggcttccggagagccggtccaagcggaggctttcagtgatttaagtacaaacatgcatctcgtgatagtcctgccttgagagcttaggaatcttccggataagtatgaagcaattcgtaggcctgtttcccatctgattccatagggggctgggtgtggccttcgggttgacatgagaaaggtctttagcaatcatttctgcaccggagatgagttttatcctgtgttggggagaggtgctcaccctccaccctgtgtccctgttttggtagcaagagtgaccgatgtcaagaacgagcatcaaagccagaatcctgcttgtttgcttaaaaatgtaattgggggcggcgggggaggagaggggaaagagacattcgcttggtttagtgaaacgcaggtgactttgtagctctgtggtcagcctacttgtctgctctgagggagagtgcgtggggagccatgctcaccgtggcaaacacaggaaccccatgactcgcccctcacctggcgtggagctgcctggtttgggctggagcagagctggtttcctggaatgttcctttggcccacatatggttctgtcccggtgagctctgttgtcagaggctcacgggacagaaccacatgctagggtctagggcccctgtctactgatagtcagtttgctgtgtcagaaagcacttctgaaagcagatatgagtcaccagacaggcaggatcttacaaaactcacgggcctctttggtctgcatgatggccccatgcgtttcataggctgtccactgagcgggattgtctgctgagtgggatgagccaactccagtttcttaaggaaaccactggaatctgcagcccccacatgcatctgtctaacgcatgcctcgtgttcgttttgcaaacatgcctgtggtggagggtggtcagttgtagccctgtgcgtctcaaggctgccttgtgaggccattcccagtgcgtgcccttgagctccttaccaccccttttcctgctcggccctttaatccctgacagacctggactgtgtggctgaagggggacctgcagcactgcagaaatgcctctgcgtggtgccatgaaggaaagaaaccttggcctggtctcgagaagcttcccatgcttcaggaagttagtaagggtggggtggcttgcaggattggcctgtttccagggcctcccacactcattggccagattgtgaactttgtcaggcttgtccctccctgataccaagtatgtcgagaaccgatggccccaccctctggctggtgctgggccggaggtggctatggaggattttggcatgcgtggcctgtcgccacctggacagcgtgacctcaggggttgtccactttacctttatggtgaggcctgtcggatggctaagtccttgaaaccctagagctgtgacgtagaatatgtgctgtctgtgagaccgtgttcccaggagcactgactgcagttgagagagacccattttgctctcccttaccgccccccgccccgggtgctttctgcacaaagcctagagcctggcactcaagcccaccggtggcagctcctagtgactggacatgcctggaagacccctcagccttctgtttgcagaacgttcatttcaggagcttctccttcccacagacatcttacacttgctcgacactgccacctgcagaagcctggcgggctctggtcaccatgtgtctatctgaaggttgcactggccagcatgggcctgtcccaagcgagaggggagacacagtggactgaaaggactggttgaaagtggccaatctctatcagcttaatttggcagagaaaatttgtaacaactctgagcacatgctgggtgaagtcacagctcaaggaaagataaagctgggcggaaggaggtgtgcgtggcttctggggtgggacccagaggggaggctctgggacaggggctggggttcagtgccagggccctgaggaagaaatggggactgatctcaaaattccagaattccctgtacatctgttcacgtgcttgtgtccaggtgtgacttgtaaactgtctagtgtttgcattaaataaaatggcaccgagcaga

SEQ ID NO: 11497 - protein, 78 aa, Homo sapiens [sequence omitted]

SEQ ID NO: 11498 - DNA, 3678 bp, Homo sapiens
cgctaactgtgctcctccggggccctccgcctgctcccagccatggtggcctggcgctcggcgttccttgtctgcctcgctttctccttggccaccctggtccagcgaggatctggggactttgatgattttaacctggaggatgcagtgaaagaaacttcctcagtaaagccacacatcccttattcgttttaagcactgcacggtatgccatagttgtggatttggccatgacctgtattgaaaaatgggtttattaagatctctttgtattatatattgagagccatgggaccacaccaccaccaccacaaccaataggccaggaaccaccagagctccggcaaaacctccaggtagtggattggacttggctgatgctttggatgatcaagatgatggccgcaggaaaccgggtataggaggaagagagagatggaaccatgtaaccaccacgaccaagaggccagtaaccaccagagctccagcaaatactttaggaaatgattttgacttggctgatgccctggatgatcgaaatgatcgagatgatggccgcaggaaaccaattgctggaggaggaggtttttcagacaaggatcttgaagacatagtagggggtggagaatacaaacctgacaagggtaaaggtgatggccggtacggcagcaatgacgaccctggatctggtgggtttctgaatcctgaggctcctgttggccacaggcatggtggcagagcctggcaccattgccggggtggccagcgccctggccatggccctcatcggtgccgtctccagctacatctcctaccagcagaagaagttctgcttcagcattcagcagggtctcaacgcagactacgtgaagggagagaacctggaagccgtggtatgtgaggaaccccaagtgaaatactccacgttgcacacgcagtctgcagagccgccgccgccgcccgaaccagcccggatctgagggccctgtccagctgcaggcatgcacaatggtgccaccgcttgtcacccggctccccccaccccttcatttggacccgcagctgctgtgctgctctgtgccatcggctccttgttggtctgagtttcccggatgagctctgggtgtttgtgagtttggtttctctgccctgccccaagcgtgctgagacttggtgccgaaattcaagagccagctctgatagaaagccagcaccagcctcgggagctgctgagccaccaactcccaaagccagcctgcctccagctttactgagcacaggatgcgggggccaagatgatgctgaggcctgatgacatttatgcttaggggacaagagtttgaactcaagggactgtgacccctgcacactggagtggctcattgtggcaggtttctgccaatagacagcccctgacagtggcctcaaggagctgcaggtggggggctcagcctgcacccacttggagcccctgcaaggagcgaaccggtcagcaccaagtaacaccacacacacgcagcacccaggatgatggtttcacttcagtcttccccatcccaggttttatgttgctgggcttccggagagccggtccaagcggaggctttcagtgatttaagtacaaacatgcatctcgtgatagtcctgccttgagagcttaggaatcttccggataagtatgaagcaattcgtaggcctgtttcccatctgattccatagggggctgggtgtggccttcgggttgacatgagaaaggtctttagcaatcatttctgcaccggagatgagttttatcctgtgttggggagaggtgctcaccctccaccctgtgtccctgttttggtagcaagagtgaccgatgtcaagaacgagcatcaaagccagaatcctgcttgtttgcttaaaaatgtaattgggggcggcgggggaggagaggggaaagagacattcgcttggtttagtgaaacgcaggtgactttgtagctctgtggtcagcctacttgtctgctctgagggagagtgcgtggggagccatgctcaccgtggcaaacacaggaaccccatgactcgcccctcacctggcgtggagctgcctggtttgggctggagcagagctggtttcctggaatgttcctttggcccacatatggttctgtcccggtgagctctgttgtcagaggctcacgggacagaaccacatgctagggtctagggcccctgtctactgatagtcagtttgctgtgtcagaaagcacttctgaaagcagatatgagtcaccagacaggcaggatcttacaaaactcacgggcctctttggtctgcatgatggccccatgcgtttcataggctgtccactgagcgggattgtctgctgagtgggatgagccaactccagtttcttaaggaaaccactggaatctgcagcccccacatgcatctgtctaacgcatgcctcgtgttcgttttgcaaacatgcctgtggtggagggtggtcagttgtagccctgtgcgtctcaaggctgccttgtgaggccattcccagtgcgtgcccttgagctccttaccaccccttttcctgctcggccctttaatccctgacagacctggactgtgtggctgaagggggacctgcagcactgcagaaatgcctctgcgtggtgccatgaaggaaagaaaccttggcctggtctcgagaagcttcccatgcttcaggaagttagtaagggtggggtggcttgcaggattggcctgtttccagggcctcccacactcattggccagattgtgaactttgtcaggcttgtccctccctgataccaagtatgtcgagaaccgatggccccaccctctggctggtgctgggccggaggtggctatggaggattttggcatgcgtggcctgtcgccacctggacagcgtgacctcaggggttgtccactttacctttatggtgaggcctgtcggatggctaagtccttgaaaccctagagctgtgacgtagaatatgtgctgtctgtgagaccgtgttcccaggagcactgactgcagttgagagagacccattttgctctcccttaccgccccccgccccgggtgctttctgcacaaagcctagagcctggcactcaagcccaccggtggcagctcctagtgactggacatgcctggaagacccctcagccttctgtttgcagaacgttcatttcaggagcttctccttcccacagacatcttacacttgctcgacactgccacctgcagaagcctggcgggctctggtcaccatgtgtctatctgaaggttgcactggccagcatgggcctgtcccaagcgagaggggagacacagtggactgaaaggactggttgaaagtggccaatctctatcagcttaatttggcagagaaaatttgtaacaactctgagcacatgctgggtgaagtcacagctcaaggaaagataaagctgggcggaaggaggtgtgcgtggcttctggggtgggacccagaggggaggctctgggacaggggctggggttcagtgccagggccctgaggaagaaatggggactgatctcaaaattccagaattccctgtacatctgttcacgtgcttgtgtccaggtgtgacttgtaaactgtctagtgtttgcattaaataaaatggcaccgagcaga

SEQ ID NO: 11499 - protein, 83 aa, Homo sapiens [sequence omitted]

SEQ ID NO: 11500 - DNA, 2683 bp, Homo sapiens
ttcgggcgctctcgcgctaactgtgctcctccggggccctccgcctgcccttcatttggacccgcagctgctgtgctgctctgtgccatcggctccttgttggtctgagtttcccggatgagctctgggtgtttgtgagtttggtttctctgccctgccccaagcgtgctgagacttggtgccgaaattcaagagccagctctgatagaaagccagcaccagcctcgggagctgctgagccaccaactcccaaagccagcctgcctccagctttactgagcacaggatgcgggggccaagatgatgctgaggcctgatgacatttatgcttaggggacaagagtttgaactcaagggactgtgacccctgcacactggagtggctcattgtggcaggtttctgccaatagacagcccctgacagtggcctcaaggagctgcaggtggggggctcagcctgcacccacttggagcccctgcaaggagcgaaccggtcagcaccaagtaacaccacacacacgcagcacccaggatgatggtttcacttcagtcttccccatcccaggttttatgttgctgggcttccggagagccggtccaagcggaggctttcagtgatttaagtacaaacatgcatctcgtgatagtcctgccttgagagcttaggaatcttccggataagtatgaagcaattcgtaggcctgtttcccatctgattccatagggggctgggtgtggccttcgggttgacatgagaaaggtctttagcaatcatttctgcaccggagatgagttttatcctgtgttggggagaggtgctcaccctccaccctgtgtccctgttttggtagcaagagtgaccgatgtcaagaacgagcatcaaagccagaatcctgcttgtttgcttaaaaatgtaattgggggcggcgggggaggagaggggaaagagacattcgcttggtttagtgaaacgcaggtgactttgtagctctgtggtcagcctacttgtctgctctgagggagagtgcgtggggagccatgctcaccgtggcaaacacaggaaccccatgactcgcccctcacctggcgtggagctgcctggtttgggctggagcagagctggtttcctggaatgttcctttggcccacatatggttctgtcccggtgagctctgttgtcagaggctcacgggacagaaccacatgctagggtctagggcccctgtctactgatagtcagtttgctgtgtcagaaagcacttctgaaagcagatatgagtcaccagacaggcaggatcttacaaaactcacgggcctctttggtctgcatgatggccccatgcgtttcataggctgtccactgagcgggattgtctgctgagtgggatgagccaactccagtttcttaaggaaaccactggaatctgcagcccccacatgcatctgtctaacgcatgcctcgtgttcgttttgcaaacatgcctgtggtggagggtggtcagttgtagccctgtgcgtctcaaggctgccttgtgaggccattcccagtgcgtgcccttgagctccttaccaccccttttcctgctcggccctttaatccctgacagacctggactgtgtggctgaagggggacctgcagcactgcagaaatgcctctgcgtggtgccatgaaggaaagaaaccttggcctggtctcgagaagcttcccatgcttcaggaagttagtaagggtggggtggcttgcaggattggcctgtttccagggcctcccacactcattggccagattgtgaactttgtcaggcttgtccctccctgataccaagtatgtcgagaaccgatggccccaccctctggctggtgctgggccggaggtggctatggaggattttggcatgcgtggcctgtcgccacctggacagcgtgacctcaggggttgtccactttacctttatggtgaggcctgtcggatggctaagtccttgaaaccctagagctgtgacgtagaatatgtgctgtctgtgagaccgtgttcccaggagcactgactgcagttgagagagacccattttgctctcccttaccgccccccgccccgggtgctttctgcacaaagcctagagcctggcactcaagcccaccggtggcagctcctagtgactggacatgcctggaagacccctcagccttctgtttgcagaacgttcatttcaggagcttctccttcccacagacatcttacacttgctcgacactgccacctgcagaagcctggcgggctctggtcaccatgtgtctatctgaaggttgcactggccagcatgggcctgtcccaagcgagaggggagacacagtggactgaaaggactggttgaaagtggccaatctctatcagcttaatttggcagagaaaatttgtaacaactctgagcacatgctgggtgaagtcacagctcaaggaaagataaagctgggcggaaggaggtgtgcgtggcttctggggtgggacccagaggggaggctctgggacaggggctggggttcagtgccagggccctgaggaagaaatggggactgatctcaaaattccagaattccctgtacatctgttcacgtgcttgtgtccaggtgtgacttgtaaactgtctagtgtttgcattaaataaaatggcaccgagcaga

SEQ ID NO: 11501 - protein, 78 aa, Homo sapiens [sequence omitted]

SEQ ID NO: 11502 - DNA, 1833 bp, Homo sapiens
tgcagaggcggcggggctcctcctcccgctcctcctcggcctccccttcgggcgctctcgcgctaactgtgctcctccgggggaggagaggggaaagagacattcgcttggtttagtgaaacgcaggtgactttgtagctctgtggtcagcctacttgtctgctctgagggagagtgcgtggggagccatgctcaccgtggcaaacacaggaaccccatgactcgcccctcacctggcgtggagctgcctggtttgggctggagcagagctggtttcctggaatgttcctttggcccacatatggttctgtcccggtgagctctgttgtcagaggctcacgggacagaaccacatgctagggtctagggcccctgtctactgatagtcagtttgctgtgtcagaaagcacttctgaaagcagatatgagtcaccagacaggcaggatcttacaaaactcacgggcctctttggtctgcatgatggccccatgcgtttcataggctgtccactgagcgggattgtctgctgagtgggatgagccaactccagtttcttaaggaaaccactggaatctgcagcccccacatgcatctgtctaacgcatgcctcgtgttcgttttgcaaacatgcctgtggtggagggtggtcagttgtagccctgtgcgtctcaaggctgccttgtgaggccattcccagtgcgtgcccttgagctccttaccaccccttttcctgctcggccctttaatccctgacagacctggactgtgtggctgaagggggacctgcagcactgcagaaatgcctctgcgtggtgccatgaaggaaagaaaccttggcctggtctcgagaagcttcccatgcttcaggaagttagtaagggtggggtggcttgcaggattggcctgtttccagggcctcccacactcattggccagattgtgaactttgtcaggcttgtccctccctgataccaagtatgtcgagaaccgatggccccaccctctggctggtgctgggccggaggtggctatggaggattttggcatgcgtggcctgtcgccacctggacagcgtgacctcaggggttgtccactttacctttatggtgaggcctgtcggatggctaagtccttgaaaccctagagctgtgacgtagaatatgtgctgtctgtgagaccgtgttcccaggagcactgactgcagttgagagagacccattttgctctcccttaccgccccccgccccgggtgctttctgcacaaagcctagagcctggcactcaagcccaccggtggcagctcctagtgactggacatgcctggaagacccctcagccttctgtttgcagaacgttcatttcaggagcttctccttcccacagacatcttacacttgctcgacactgccacctgcagaagcctggcgggctctggtcaccatgtgtctatctgaaggttgcactggccagcatgggcctgtcccaagcgagaggggagacacagtggactgaaaggactggttgaaagtggccaatctctatcagcttaatttggcagagaaaatttgtaacaactctgagcacatgctgggtgaagtcacagctcaaggaaagataaagctgggcggaaggaggtgtgcgtggcttctggggtgggacccagaggggaggctctgggacaggggctggggttcagtgccagggccctgaggaagaaatggggactgatctcaaaattccagaattccctgtacatctgttcacgtgcttgtgtccaggtgtgacttgtaaactgtctagtgtttgcattaaataaaatggcaccgagcaga

SEQ ID NO: 11503 - protein, 52 aa, Homo sapiens; identical to SEQ ID NO: 11481

SEQ ID NO: 11504 - DNA, 3389 bp, Homo sapiens
gctttgggcgggaccctgcagaggcggcggggctcctcctcccgctcctcctcggcctccccttcgggcgctctcgcgctaactgtgctcctccggggccctccgcctgctcccagccatggtggcctggcgctcggcgttccttgtctgcctcgctttctccttggccaccctggtccagcgaggatctggggactttgatgattttaacctggaggatgcagtgaaagaaacttcctcagtaaagcgaaatgattttgacttggctgatgccctggatgatcgaaatgatcgagatgatggccgcaggaaaccaattgctggaggaggaggtttttcagacaaggatcttgaagacatagtagggggtggagaatacaaacctgacaagggtaaaggtgatggccggtacggcagcaatgacgaccctggatctggcatggtggcagagcctggcaccattgccggggtggccagcgccctggccatggccctcatcggtgccgtctccagctacatctcctaccagcagaagaagttctgcttcagcattcagcagggtctcaacgcagactacgtgaagggagagaacctggaagccgtggtatgtgaggaaccccaagtgaaatactccacgttgcacacgcagtctgcagagccgccgccgccgcccgaaccagcccggatctgagggccctgtccagctgcaggcatgcacaatggtgccaccgcttgtcacccggctccccccaccccttcatttggacccgcagctgctgtgctgctctgtgccatcggctccttgttggtctgagtttcccggatgagctctgggtgtttgtgagtttggtttctctgccctgccccaagcgtgctgagacttggtgccgaaattcaagagccagctctgatagaaagccagcaccagcctcgggagctgctgagccaccaactcccaaagccagcctgcctccagctttactgagcacaggatgcgggggccaagatgatgctgaggcctgatgacatttatgcttaggggacaagagtttgaactcaagggactgtgacccctgcacactggagtggctcattgtggcaggtttctgccaatagacagcccctgacagtggcctcaaggagctgcaggtggggggctcagcctgcacccacttggagcccctgcaaggagcgaaccggtcagcaccaagtaacaccacacacacgcagcacccaggatgatggtttcacttcagtcttccccatcccaggttttatgttgctgggcttccggagagccggtccaagcggaggctttcagtgatttaagtacaaacatgcatctcgtgatagtcctgccttgagagcttaggaatcttccggataagtatgaagcaattcgtaggcctgtttcccatctgattccatagggggctgggtgtggccttcgggttgacatgagaaaggtctttagcaatcatttctgcaccggagatgagttttatcctgtgttggggagaggtgctcaccctccaccctgtgtccctgttttggtagcaagagtgaccgatgtcaagaacgagcatcaaagccagaatcctgcttgtttgcttaaaaatgtaattgggggcggcgggggaggagaggggaaagagacattcgcttggtttagtgaaacgcaggtgactttgtagctctgtggtcagcctacttgtctgctctgagggagagtgcgtggggagccatgctcaccgtggcaaacacaggaaccccatgactcgcccctcacctggcgtggagctgcctggtttgggctggagcagagctggtttcctggaatgttcctttggcccacatatggttctgtcccggtgagctctgttgtcagaggctcacgggacagaaccacatgctagggtctagggcccctgtctactgatagtcagtttgctgtgtcagaaagcacttctgaaagcagatatgagtcaccagacaggcaggatcttacaaaactcacgggcctctttggtctgcatgatggccccatgcgtttcataggctgtccactgagcgggattgtctgctgagtgggatgagccaactccagtttcttaaggaaaccactggaatctgcagcccccacatgcatctgtctaacgcatgcctcgtgttcgttttgcaaacatgcctgtggtggagggtggtcagttgtagccctgtgcgtctcaaggctgccttgtgaggccattcccagtgcgtgcccttgagctccttaccaccccttttcctgctcggccctttaatccctgacagacctggactgtgtggctgaagggggacctgcagcactgcagaaatgcctctgcgtggtgccatgaaggaaagaaaccttggcctggtctcgagaagcttcccatgcttcaggaagttagtaagggtggggtggcttgcaggattggcctgtttccagggcctcccacactcattggccagattgtgaactttgtcaggcttgtccctccctgataccaagtatgtcgagaaccgatggccccaccctctggctggtgctgggccggaggtggctatggaggattttggcatgcgtggcctgtcgccacctggacagcgtgacctcaggggttgtccactttacctttatggtgaggcctgtcggatggctaagtccttgaaaccctagagctgtgacgtagaatatgtgctgtctgtgagaccgtgttcccaggagcactgactgcagttgagagagacccattttgctctcccttaccgccccccgccccgggtgctttctgcacaaagcctagagcctggcactcaagcccaccggtggcagctcctagtgactggacatgcctggaagacccctcagccttctgtttgcagaacgttcatttcaggagcttctccttcccacagacatcttacacttgctcgacactgccacctgcagaagcctggcgggctctggtcaccatgtgtctatctgaaggttgcactggccagcatgggcctgtcccaagcgagaggggagacacagtggactgaaaggactggttgaaagtggccaatctctatcagcttaatttggcagagaaaatttgtaacaactctgagcacatgctgggtgaagtcacagctcaaggaaagataaagctgggcggaaggaggtgtgcgtggcttctggggtgggacccagaggggaggctctgggacaggggctggggttcagtgccagggccctgaggaagaaatggggactgatctcaaaattccagaattccctgtacatctgttcacgtgcttgtgtccaggtgtgacttgtaaactgtctagtgtttgcattaaataaaatggcaccgagcaga

SEQ ID NO: 11505 - protein, 190 aa, Homo sapiens; identical to SEQ ID NO: 1824

SEQ ID NO: 11506 - DNA, 3459 bp, Homo sapiens
ggctttgggcgggaccctgcagaggcggcggggctcctcctcccgctcctcctcggcctccccttcgggcgctctcgcgctaactgtgctcctccggggccctccgcctgctcccagccatggtggcctggcgctcggcgttccttgtctgcctcgctttctccttggccaccctggtccagcgaggatctggggactttgatgattttaacctggaggatgcagtgaaagaaacttcctcagtaaagcagagatggaaccatgtaaccaccacgaccaagaggccagtaaccaccagagctccagcaaatactttaggaaatgattttgacttggctgatgccctggatgatcgaaatgatcgagatgatggccgcaggaaaccaattgctggaggaggaggtttttcagacaaggatcttgaagacatagtagggggtggagaatacaaacctgacaagggtaaaggtgatggccggtacggcagcaatgacgaccctggatctggcatggtggcagagcctggcaccattgccggggtggccagcgccctggccatggccctcatcggtgccgtctccagctacatctcctaccagcagaagaagttctgcttcagcattcagcagggtctcaacgcagactacgtgaagggagagaacctggaagccgtggtatgtgaggaaccccaagtgaaatactccacgttgcacacgcagtctgcagagccgccgccgccgcccgaaccagcccggatctgagggccctgtccagctgcaggcatgcacaatggtgccaccgcttgtcacccggctccccccaccccttcatttggacccgcagctgctgtgctgctctgtgccatcggctccttgttggtctgagtttcccggatgagctctgggtgtttgtgagtttggtttctctgccctgccccaagcgtgctgagacttggtgccgaaattcaagagccagctctgatagaaagccagcaccagcctcgggagctgctgagccaccaactcccaaagccagcctgcctccagctttactgagcacaggatgcgggggccaagatgatgctgaggcctgatgacatttatgcttaggggacaagagtttgaactcaagggactgtgacccctgcacactggagtggctcattgtggcaggtttctgccaatagacagcccctgacagtggcctcaaggagctgcaggtggggggctcagcctgcacccacttggagcccctgcaaggagcgaaccggtcagcaccaagtaacaccacacacacgcagcacccaggatgatggtttcacttcagtcttccccatcccaggttttatgttgctgggcttccggagagccggtccaagcggaggctttcagtgatttaagtacaaacatgcatctcgtgatagtcctgccttgagagcttaggaatcttccggataagtatgaagcaattcgtaggcctgtttcccatctgattccatagggggctgggtgtggccttcgggttgacatgagaaaggtctttagcaatcatttctgcaccggagatgagttttatcctgtgttggggagaggtgctcaccctccaccctgtgtccctgttttggtagcaagagtgaccgatgtcaagaacgagcatcaaagccagaatcctgcttgtttgcttaaaaatgtaattgggggcggcgggggaggagaggggaaagagacattcgcttggtttagtgaaacgcaggtgactttgtagctctgtggtcagcctacttgtctgctctgagggagagtgcgtggggagccatgctcaccgtggcaaacacaggaaccccatgactcgcccctcacctggcgtggagctgcctggtttgggctggagcagagctggtttcctggaatgttcctttggcccacatatggttctgtcccggtgagctctgttgtcagaggctcacgggacagaaccacatgctagggtctagggcccctgtctactgatagtcagtttgctgtgtcagaaagcacttctgaaagcagatatgagtcaccagacaggcaggatcttacaaaactcacgggcctctttggtctgcatgatggccccatgcgtttcataggctgtccactgagcgggattgtctgctgagtgggatgagccaactccagtttcttaaggaaaccactggaatctgcagcccccacatgcatctgtctaacgcatgcctcgtgttcgttttgcaaacatgcctgtggtggagggtggtcagttgtagccctgtgcgtctcaaggctgccttgtgaggccattcccagtgcgtgcccttgagctccttaccaccccttttcctgctcggccctttaatccctgacagacctggactgtgtggctgaagggggacctgcagcactgcagaaatgcctctgcgtggtgccatgaaggaaagaaaccttggcctggtctcgagaagcttcccatgcttcaggaagttagtaagggtggggtggcttgcaggattggcctgtttccagggcctcccacactcattggccagattgtgaactttgtcaggcttgtccctccctgataccaagtatgtcgagaaccgatggccccaccctctggctggtgctgggccggaggtggctatggaggattttggcatgcgtggcctgtcgccacctggacagcgtgacctcaggggttgtccactttacctttatggtgaggcctgtcggatggctaagtccttgaaaccctagagctgtgacgtagaatatgtgctgtctgtgagaccgtgttcccaggagcactgactgcagttgagagagacccattttgctctcccttaccgccccccgccccgggtgctttctgcacaaagcctagagcctggcactcaagcccaccggtggcagctcctagtgactggacatgcctggaagacccctcagccttctgtttgcagaacgttcatttcaggagcttctccttcccacagacatcttacacttgctcgacactgccacctgcagaagcctggcgggctctggtcaccatgtgtctatctgaaggttgcactggccagcatgggcctgtcccaagcgagaggggagacacagtggactgaaaggactggttgaaagtggccaatctctatcagcttaatttggcagagaaaatttgtaacaactctgagcacatgctgggtgaagtcacagctcaaggaaagataaagctgggcggaaggaggtgtgcgtggcttctggggtgggacccagaggggaggctctgggacaggggctggggttcagtgccagggccctgaggaagaaatggggactgatctcaaaattccagaattccctgtacatctgttcacgtgcttgtgtccaggtgtgacttgtaaactgtctagtgtttgcattaaataaaatggcaccgagcaga

SEQ ID NO: 11507 - protein, 213 aa, Homo sapiens; identical to SEQ ID NO: 1826

SEQ ID NO: 11508 - DNA, 3248 bp, Homo sapiens
gcgggctttgggcgggaccctgcagaggcggcggggctcctcctcccgctcctcctcggcctccccttcgggcgctctcgcgctaactgtgctcctccggggccctccgcctgctcccagccatggtggcctggcgctcggcgttccttgtctgcctcgctttctccttggccaccctggtccagcgaggatctggggactttgatgattttaacctggaggatgcagtgaaagaaacttcctcagtaaagcagccatgggaccacaccaccaccaccacaaccaataggccaggaaccaccagagctccggcaaaacctccaggtagtggattggacttggctgatgctttggatgatcaagatgatggccgcaggaaaccgggtataggaggaagagagagatggaaccatgtaaccaccacgaccaagaggccagtaaccaccagagctccagcaaatactttaggaaatgattttgacttggctgatgccctggatgatcgaaatgatcgagatgatggccgccgcccgaaccagcccggatctgagggccctgtccagctgcaggcatgcacaatggtgccaccgcttgtcacccggctccccccaccccttcatttggacccgcagctgctgtgctgctctgtgccatcggctccttgttggtctgagtttcccggatgagctctgggtgtttgtgagtttggtttctctgccctgccccaagcgtgctgagacttggtgccgaaattcaagagccagctctgatagaaagccagcaccagcctcgggagctgctgagccaccaactcccaaagccagcctgcctccagctttactgagcacaggatgcgggggccaagatgatgctgaggcctgatgacatttatgcttaggggacaagagtttgaactcaagggactgtgacccctgcacactggagtggctcattgtggcaggtttctgccaatagacagcccctgacagtggcctcaaggagctgcaggtggggggctcagcctgcacccacttggagcccctgcaaggagcgaaccggtcagcaccaagtaacaccacacacacgcagcacccaggatgatggtttcacttcagtcttccccatcccaggttttatgttgctgggcttccggagagccggtccaagcggaggctttcagtgatttaagtacaaacatgcatctcgtgatagtcctgccttgagagcttaggaatcttccggataagtatgaagcaattcgtaggcctgtttcccatctgattccatagggggctgggtgtggccttcgggttgacatgagaaaggtctttagcaatcatttctgcaccggagatgagttttatcctgtgttggggagaggtgctcaccctccaccctgtgtccctgttttggtagcaagagtgaccgatgtcaagaacgagcatcaaagccagaatcctgcttgtttgcttaaaaatgtaattgggggcggcgggggaggagaggggaaagagacattcgcttggtttagtgaaacgcaggtgactttgtagctctgtggtcagcctacttgtctgctctgagggagagtgcgtggggagccatgctcaccgtggcaaacacaggaaccccatgactcgcccctcacctggcgtggagctgcctggtttgggctggagcagagctggtttcctggaatgttcctttggcccacatatggttctgtcccggtgagctctgttgtcagaggctcacgggacagaaccacatgctagggtctagggcccctgtctactgatagtcagtttgctgtgtcagaaagcacttctgaaagcagatatgagtcaccagacaggcaggatcttacaaaactcacgggcctctttggtctgcatgatggccccatgcgtttcataggctgtccactgagcgggattgtctgctgagtgggatgagccaactccagtttcttaaggaaaccactggaatctgcagcccccacatgcatctgtctaacgcatgcctcgtgttcgttttgcaaacatgcctgtggtggagggtggtcagttgtagccctgtgcgtctcaaggctgccttgtgaggccattcccagtgcgtgcccttgagctccttaccaccccttttcctgctcggccctttaatccctgacagacctggactgtgtggctgaagggggacctgcagcactgcagaaatgcctctgcgtggtgccatgaaggaaagaaaccttggcctggtctcgagaagcttcccatgcttcaggaagttagtaagggtggggtggcttgcaggattggcctgtttccagggcctcccacactcattggccagattgtgaactttgtcaggcttgtccctccctgataccaagtatgtcgagaaccgatggccccaccctctggctggtgctgggccggaggtggctatggaggattttggcatgcgtggcctgtcgccacctggacagcgtgacctcaggggttgtccactttacctttatggtgaggcctgtcggatggctaagtccttgaaaccctagagctgtgacgtagaatatgtgctgtctgtgagaccgtgttcccaggagcactgactgcagttgagagagacccattttgctctcccttaccgccccccgccccgggtgctttctgcacaaagcctagagcctggcactcaagcccaccggtggcagctcctagtgactggacatgcctggaagacccctcagccttctgtttgcagaacgttcatttcaggagcttctccttcccacagacatcttacacttgctcgacactgccacctgcagaagcctggcgggctctggtcaccatgtgtctatctgaaggttgcactggccagcatgggcctgtcccaagcgagaggggagacacagtggactgaaaggactggttgaaagtggccaatctctatcagcttaatttggcagagaaaatttgtaacaactctgagcacatgctgggtgaagtcacagctcaaggaaagataaagctgggcggaaggaggtgtgcgtggcttctggggtgggacccagaggggaggctctgggacaggggctggggttcagtgccagggccctgaggaagaaatggggactgatctcaaaattccagaattccctgtacatctgttcacgtgcttgtgtccaggtgtgacttgtaaactgtctagtgtttgcattaaataaaatggcaccgagcaga

SEQ ID NO: 11509 - protein, 187 aa, Homo sapiens
MVAWRSAFLVCLAFSLATLVQRGSGDFDDFNLEDAVKETSSVKQPWDHTTTTTTNRPGTTRAPAKPPGSGLDLADALDDQDDGRRKPGIGGRERWNHVTTTTKRPVTTRAPANTLGNDFDLADALDDRNDRDDGRRPNQPGSEGPVQLQACTMVPPLVTRLPPPLHLDPQLLCCSVPSAPCWSEFPG

SEQ ID NO: 11510 - DNA, 3609 bp, Homo sapiens
gcgggctttgggcgggaccctgcagaggcggcggggctcctcctcccgctcctcctcggcctccccttcgggcgctctcgcgctaactgtgctcctccggggccctccgcctgctcccagccatggtggcctggcgctcggcgttccttgtctgcctcgctttctccttggccaccctggtccagcgaggatctggggactttgatgattttaacctggaggatgcagtgaaagaaacttcctcagtaaagcagccatgggaccacaccaccaccaccacaaccaataggccaggaaccaccagagctccggcaaaacctccaggtagtggattggacttggctgatgctttggatgatcaagatgatggccgcaggaaaccgggtataggaggaagagagagatggaaccatgtaaccaccacgaccaagaggccagtaaccaccagagctccagcaaatactttaggaaatgattttgacttggctgatgccctggatgatcgaaatgatcgagatgatggccgcaggaaaccaattgctggaggaggaggtttttcagacaaggatcttgaagacatagtagggggtggagaatacaaacctgacaagggtaaaggtgatggccggtacggcagcaatgacgaccctggatctggcatggtggcagagcctggcaccattgccggggtggccagcgccctggccatggccctcatcggtgccgtctccagctacatctcctaccagcagaagaagttctgcttcagcattcagcagggtctcaacgcagactacgtgaagggagagaacctggaagccgtggtatgtgaggaaccccaagtgaaatactccacgttgcacacgcagtctgcagagccgccgccgccgcccgaaccagcccggatctgagggccctgtccagctgcaggcatgcacaatggtgccaccgcttgtcacccggctccccccaccccttcatttggacccgcagctgctgtgctgctctgtgccatcggctccttgttggtctgagtttcccggatgagctctgggtgtttgtgagtttggtttctctgccctgccccaagcgtgctgagacttggtgccgaaattcaagagccagctctgatagaaagccagcaccagcctcgggagctgctgagccaccaactcccaaagccagcctgcctccagctttactgagcacaggatgcgggggccaagatgatgctgaggcctgatgacatttatgcttaggggacaagagtttgaactcaagggactgtgacccctgcacactggagtggctcattgtggcaggtttctgccaatagacagcccctgacagtggcctcaaggagctgcaggtggggggctcagcctgcacccacttggagcccctgcaaggagcgaaccggtcagcaccaagtaacaccacacacacgcagcacccaggatgatggtttcacttcagtcttccccatcccaggttttatgttgctgggcttccggagagccggtccaagcggaggctttcagtgatttaagtacaaacatgcatctcgtgatagtcctgccttgagagcttaggaatcttccggataagtatgaagcaattcgtaggcctgtttcccatctgattccatagggggctgggtgtggccttcgggttgacatgagaaaggtctttagcaatcatttctgcaccggagatgagttttatcctgtgttggggagaggtgctcaccctccaccctgtgtccctgttttggtagcaagagtgaccgatgtcaagaacgagcatcaaagccagaatcctgcttgtttgcttaaaaatgtaattgggggcggcgggggaggagaggggaaagagacattcgcttggtttagtgaaacgcaggtgactttgtagctctgtggtcagcctacttgtctgctctgagggagagtgcgtggggagccatgctcaccgtggcaaacacaggaaccccatgactcgcccctcacctggcgtggagctgcctggtttgggctggagcagagctggtttcctggaatgttcctttggcccacatatggttctgtcccggtgagctctgttgtcagaggctcacgggacagaaccacatgctagggtctagggcccctgtctactgatagtcagtttgctgtgtcagaaagcacttctgaaagcagatatgagtcaccagacaggcaggatcttacaaaactcacgggcctctttggtctgcatgatggccccatgcgtttcataggctgtccactgagcgggattgtctgctgagtgggatgagccaactccagtttcttaaggaaaccactggaatctgcagcccccacatgcatctgtctaacgcatgcctcgtgttcgttttgcaaacatgcctgtggtggagggtggtcagttgtagccctgtgcgtctcaaggctgccttgtgaggccattcccagtgcgtgcccttgagctccttaccaccccttttcctgctcggccctttaatccctgacagacctggactgtgtggctgaagggggacctgcagcactgcagaaatgcctctgcgtggtgccatgaaggaaagaaaccttggcctggtctcgagaagcttcccatgcttcaggaagttagtaagggtggggtggcttgcaggattggcctgtttccagggcctcccacactcattggccagattgtgaactttgtcaggcttgtccctccctgataccaagtatgtcgagaaccgatggccccaccctctggctggtgctgggccggaggtggctatggaggattttggcatgcgtggcctgtcgccacctggacagcgtgacctcaggggttgtccactttacctttatggtgaggcctgtcggatggctaagtccttgaaaccctagagctgtgacgtagaatatgtgctgtctgtgagaccgtgttcccaggagcactgactgcagttgagagagacccattttgctctcccttaccgccccccgccccgggtgctttctgcacaaagcctagagcctggcactcaagcccaccggtggcagctcctagtgactggacatgcctggaagacccctcagccttctgtttgcagaacgttcatttcaggagcttctccttcccacagacatcttacacttgctcgacactgccacctgcagaagcctggcgggctctggtcaccatgtgtctatctgaaggttgcactggccagcatgggcctgtcccaagcgagaggggagacacagtggactgaaaggactggttgaaagtggccaatctctatcagcttaatttggcagagaaaatttgtaacaactctgagcacatgctgggtgaagtcacagctcaaggaaagataaagctgggcggaaggaggtgtgcgtggcttctggggtgggacccagaggggaggctctgggacaggggctggggttcagtgccagggccctgaggaagaaatggggactgatctcaaaattccagaattccctgtacatctgttcacgtgcttgtgtccaggtgtgacttgtaaactgtctagtgtttgcattaaataaaatggcaccgagcaga

SEQ ID NO: 11511 - protein, 262 aa, Homo sapiens; identical to SEQ ID NO: 1822

SEQ ID NO: 11512 - DNA, 3205 bp, Homo sapiens
gcgggctttgggcgggaccctgcagaggcggcggggctcctcctcccgctcctcctcggcctccccttcgggcgctctcgcgctaactgtgctcctccggggccctccgcctgctcccagccatggtggcctggcgctcggcgttccttgtctgcctcgctttctccttggccaccctggtccagcgaggatctggggactttgatgattttaacctggaggatgcagtgaaagaaacttcctcagtaaagcagccatgggaccacaccaccaccaccacaaccaataggccaggaaccaccagagctccggcaaaacctccaggtagtggattggacttggctgatgctttggatgatcaagatgatggccgcaggaaaccgggtataggaggaagagggagagaacctggaagccgtggtatgtgaggaaccccaagtgaaatactccacgttgcacacgcagtctgcagagccgccgccgccgcccgaaccagcccggatctgagggccctgtccagctgcaggcatgcacaatggtgccaccgcttgtcacccggctccccccaccccttcatttggacccgcagctgctgtgctgctctgtgccatcggctccttgttggtctgagtttcccggatgagctctgggtgtttgtgagtttggtttctctgccctgccccaagcgtgctgagacttggtgccgaaattcaagagccagctctgatagaaagccagcaccagcctcgggagctgctgagccaccaactcccaaagccagcctgcctccagctttactgagcacaggatgcgggggccaagatgatgctgaggcctgatgacatttatgcttaggggacaagagtttgaactcaagggactgtgacccctgcacactggagtggctcattgtggcaggtttctgccaatagacagcccctgacagtggcctcaaggagctgcaggtggggggctcagcctgcacccacttggagcccctgcaaggagcgaaccggtcagcaccaagtaacaccacacacacgcagcacccaggatgatggtttcacttcagtcttccccatcccaggttttatgttgctgggcttccggagagccggtccaagcggaggctttcagtgatttaagtacaaacatgcatctcgtgatagtcctgccttgagagcttaggaatcttccggataagtatgaagcaattcgtaggcctgtttcccatctgattccatagggggctgggtgtggccttcgggttgacatgagaaaggtctttagcaatcatttctgcaccggagatgagttttatcctgtgttggggagaggtgctcaccctccaccctgtgtccctgttttggtagcaagagtgaccgatgtcaagaacgagcatcaaagccagaatcctgcttgtttgcttaaaaatgtaattgggggcggcgggggaggagaggggaaagagacattcgcttggtttagtgaaacgcaggtgactttgtagctctgtggtcagcctacttgtctgctctgagggagagtgcgtggggagccatgctcaccgtggcaaacacaggaaccccatgactcgcccctcacctggcgtggagctgcctggtttgggctggagcagagctggtttcctggaatgttcctttggcccacatatggttctgtcccggtgagctctgttgtcagaggctcacgggacagaaccacatgctagggtctagggcccctgtctactgatagtcagtttgctgtgtcagaaagcacttctgaaagcagatatgagtcaccagacaggcaggatcttacaaaactcacgggcctctttggtctgcatgatggccccatgcgtttcataggctgtccactgagcgggattgtctgctgagtgggatgagccaactccagtttcttaaggaaaccactggaatctgcagcccccacatgcatctgtctaacgcatgcctcgtgttcgttttgcaaacatgcctgtggtggagggtggtcagttgtagccctgtgcgtctcaaggctgccttgtgaggccattcccagtgcgtgcccttgagctccttaccaccccttttcctgctcggccctttaatccctgacagacctggactgtgtggctgaagggggacctgcagcactgcagaaatgcctctgcgtggtgccatgaaggaaagaaaccttggcctggtctcgagaagcttcccatgcttcaggaagttagtaagggtggggtggcttgcaggattggcctgtttccagggcctcccacactcattggccagattgtgaactttgtcaggcttgtccctccctgataccaagtatgtcgagaaccgatggccccaccctctggctggtgctgggccggaggtggctatggaggattttggcatgcgtggcctgtcgccacctggacagcgtgacctcaggggttgtccactttacctttatggtgaggcctgtcggatggctaagtccttgaaaccctagagctgtgacgtagaatatgtgctgtctgtgagaccgtgttcccaggagcactgactgcagttgagagagacccattttgctctcccttaccgccccccgccccgggtgctttctgcacaaagcctagagcctggcactcaagcccaccggtggcagctcctagtgactggacatgcctggaagacccctcagccttctgtttgcagaacgttcatttcaggagcttctccttcccacagacatcttacacttgctcgacactgccacctgcagaagcctggcgggctctggtcaccatgtgtctatctgaaggttgcactggccagcatgggcctgtcccaagcgagaggggagacacagtggactgaaaggactggttgaaagtggccaatctctatcagcttaatttggcagagaaaatttgtaacaactctgagcacatgctgggtgaagtcacagctcaaggaaagataaagctgggcggaaggaggtgtgcgtggcttctggggtgggacccagaggggaggctctgggacaggggctggggttcagtgccagggccctgaggaagaaatggggactgatctcaaaattccagaattccctgtacatctgttcacgtgcttgtgtccaggtgtgacttgtaaactgtctagtgtttgcattaaataaaatggcaccgagcaga

SEQ ID NO: 11513 - protein, 101 aa, Homo sapiens
MVAWRSAFLVCLAFSLATLVQRGSGDFDDFNLEDAVKETSSVKQPWDHTTTTTTNRPGTTRAPAKPPGSGLDLADALDDQDDGRRKPGIGGRGREPGSRGM

SEQ ID NO: 11514 - DNA, 2843 bp, Homo sapiens
gcgggctttgggcgggaccctgcagaggcggcggggctcctcctcccgctcctcctcggcctccccttcgggcgctctcgcgctaactgtgctcctccggggccctccgcctgctcccagccatggtggcctggcgctcggcgttccttgtctgcctcgctttctccttggccaccctggtccagcgaggatctggggactttgatgattttaacctggaggatgcagtgaaagaaacttcctcagtaaagcagccatgggaccacaccaccaccaccacaaccaataggccaggaaccaccagagctccggcaaaacctccaggtagtggattggacttggctgatgctttggatgatcaagatgatggccgcaggaaaccgggtataggaggaagagccaccaactcccaaagccagcctgcctccagctttactgagcacaggatgcgggggccaagatgatgctgaggcctgatgacatttatgcttaggggacaagagtttgaactcaagggactgtgacccctgcacactggagtggctcattgtggcaggtttctgccaatagacagcccctgacagtggcctcaaggagctgcaggtggggggctcagcctgcacccacttggagcccctgcaaggagcgaaccggtcagcaccaagtaacaccacacacacgcagcacccaggatgatggtttcacttcagtcttccccatcccaggttttatgttgctgggcttccggagagccggtccaagcggaggctttcagtgatttaagtacaaacatgcatctcgtgatagtcctgccttgagagcttaggaatcttccggataagtatgaagcaattcgtaggcctgtttcccatctgattccatagggggctgggtgtggccttcgggttgacatgagaaaggtctttagcaatcatttctgcaccggagatgagttttatcctgtgttggggagaggtgctcaccctccaccctgtgtccctgttttggtagcaagagtgaccgatgtcaagaacgagcatcaaagccagaatcctgcttgtttgcttaaaaatgtaattgggggcggcgggggaggagaggggaaagagacattcgcttggtttagtgaaacgcaggtgactttgtagctctgtggtcagcctacttgtctgctctgagggagagtgcgtggggagccatgctcaccgtggcaaacacaggaaccccatgactcgcccctcacctggcgtggagctgcctggtttgggctggagcagagctggtttcctggaatgttcctttggcccacatatggttctgtcccggtgagctctgttgtcagaggctcacgggacagaaccacatgctagggtctagggcccctgtctactgatagtcagtttgctgtgtcagaaagcacttctgaaagcagatatgagtcaccagacaggcaggatcttacaaaactcacgggcctctttggtctgcatgatggccccatgcgtttcataggctgtccactgagcgggattgtctgctgagtgggatgagccaactccagtttcttaaggaaaccactggaatctgcagcccccacatgcatctgtctaacgcatgcctcgtgttcgttttgcaaacatgcctgtggtggagggtggtcagttgtagccctgtgcgtctcaaggctgccttgtgaggccattcccagtgcgtgcccttgagctccttaccaccccttttcctgctcggccctttaatccctgacagacctggactgtgtggctgaagggggacctgcagcactgcagaaatgcctctgcgtggtgccatgaaggaaagaaaccttggcctggtctcgagaagcttcccatgcttcaggaagttagtaagggtggggtggcttgcaggattggcctgtttccagggcctcccacactcattggccagattgtgaactttgtcaggcttgtccctccctgataccaagtatgtcgagaaccgatggccccaccctctggctggtgctgggccggaggtggctatggaggattttggcatgcgtggcctgtcgccacctggacagcgtgacctcaggggttgtccactttacctttatggtgaggcctgtcggatggctaagtccttgaaaccctagagctgtgacgtagaatatgtgctgtctgtgagaccgtgttcccaggagcactgactgcagttgagagagacccattttgctctcccttaccgccccccgccccgggtgctttctgcacaaagcctagagcctggcactcaagcccaccggtggcagctcctagtgactggacatgcctggaagacccctcagccttctgtttgcagaacgttcatttcaggagcttctccttcccacagacatcttacacttgctcgacactgccacctgcagaagcctggcgggctctggtcaccatgtgtctatctgaaggttgcactggccagcatgggcctgtcccaagcgagaggggagacacagtggactgaaaggactggttgaaagtggccaatctctatcagcttaatttggcagagaaaatttgtaacaactctgagcacatgctgggtgaagtcacagctcaaggaaagataaagctgggcggaaggaggtgtgcgtggcttctggggtgggacccagaggggaggctctgggacaggggctggggttcagtgccagggccctgaggaagaaatggggactgatctcaaaattccagaattccctgtacatctgttcacgtgcttgtgtccaggtgtgacttgtaaactgtctagtgtttgcattaaataaaatggcaccgagcaga

SEQ ID NO: 11515 - protein, 113 aa, Homo sapiens
MVAWRSAFLVCLAFSLATLVQRGSGDFDDFNLEDAVKETSSVKQPWDHTTTTTTNRPGTTRAPAKPPGSGLDLADALDDQDDGRRKPGIGGRATNSQSQPASSFTEHRMRGPR

SEQ ID NO: 11516 - DNA, 2849 bp, Homo sapiens
agagccatgggaccacaccaccaccaccacaaccaataggccaggaaccaccagagctccggcaaaacctccaggtagtggattggacttggctgatgctttggatgatcaagatgatggccgcaggaaaccgggtataggaggaagagagagatggaaccatgtaaccaccacgaccaagaggccagtaaccaccagagctccagcaaatactttaggaaatgattttgacttggctgatgccctggatgatcgaaatgatcgagatgatggccgcaggaaaccaattgctggaggaggaggtttttcagacaaggatcttgaagacatagtagggggtggagaatacaaacctgacaagggtaaaggtgatggccggtacggcagcaatgacgaccctggatctggcatggtggcagagcctggcaccattgccggggtggccagcgccctggccatggccctcatcggtgccgtctccagctacatctcctaccagcagaagaagttctgcttcagcattcagcagggtctcaacgcagactacgtgaagggagagaacctggaagccgtggtatgtgaggaaccccaagtgaaatactccacgttgcacacgcagtctgcagagccgccgccgccgcccgaaccagcccggatctgagggccctgtccagctgcaggcatgcacaatggtgccaccgcttgtcacccggctccccccaccccttcatttggacccgcagctgctgtgctgctctgtgccatcggctccttgttggtctgagtttcccggatgagctctgggtgtttgtgagtttggtttctctgccctgccccaagcgtgctgagacttggtgccgaaattcaagagccagctctgatagaaagccagcaccagcctcgggagctgctgagccaccaactcccaaagccagcctgcctccagctttactgagcacaggatgcgggggccaagatgatgctgaggcctgatgacatttatgcttaggggacaagagtttgaactcaagggactgtgacccctgcacactggagtggctcattgtggcaggtttctgccaatagacagcccctgacagtggcctcaaggagctgcaggtggggggctcagcctgcacccacttggagcccctgcaaggagcgaaccggtcagcaccaagtaacaccacacacacgcagcacccaggatgatggtttcacttcagtcttccccatcccaggttttatgttgctgggcttccggagagccggtccaagcggaggctttcagtgatttaagtacaaacatgcatctcgtgatagtcctgccttgagagcttaggaatcttccggataagtatgaagcaattcgtaggcctgtttcccatctgattccatagggggctgggtgtggccttcgggttgacatgagaaaggtctttagcaatcatttctgcaccggagatgagttttatcctgtgttggggagaggtgctcaccctccaccctgtgtccctgttttggtagcaagagtgaccgatgtcaagaacgagcatcaaagccagaatcctgcttgtttgcttaaaaatgtaattgggggcggcgggggaggagaggggaaagagacattcgcttggtttagtgaaacgcaggtgactttgtagctctgtggtcagcctacttgtctgctctgagggagagtgcgtggggagccatgctcaccgtggcaaacacaggaaccccatgactcgcccctcacctggcgtggagctgcctggtttgggctggagcagagctggtttcctggaatgttcctttggcccacatatggttctgtcccggtgagctctgttgtcagaggctcacgggacagaaccacatgctagggtctagggcccctgtctactgatagtcagtttgctgtgtcagaaagcacttctgaaagcagatatgagtcaccagacaggcaggatcttacaaaactcacgggcctctttggtctgcatgatggccccatgcgtttcataggctgtccactgagcgggattgtctgctgagtgggatgagccaactccagtttcttaaggaaaccactggaatctgcagcccccacatgcatctgtctaacgcatgcctcgtgttcgttttgcaaacatgcctgtggtggagggtggtcagttgtagccctgtgcgtctcaaggctgccttgtgaggccattcccagtgcgtgcccttgagctccttaccaccccttttcctgctcggccctttaatccctgacagacctggactgtgtggctgaagggggacctgcagcactgcagaaatgcctctgcgtggtgccatgaaggaaagaaaccttggcctggtctcgagaagcttcccatgcttcaggaagttagtaagggtggggtggcttgcaggattggcctgtttccagggcctcccacactcattggccagattgtgaactttgtcaggcttgtccctccctgataccaagtatgtcgagaaccgatggccccaccctctggctggtgctgggccggaggtggctatggaggattttggcatgcgtggcctgtcgccacctggacagcgtgacctcaggggttgtccactttacctttatggtgaggcctgtcggatggctaagtccttgaaaccctagagctgtgacgtagaatatgtgctgtctgtgagaccgggttcagtgccagggccctgaggaagaaatggggactgatctcaaaattccagaattccctgtacatctgttcacgtgcttgtgtccaggtgtgacttgtaaactgtctagtgtttgcattaaataaaatggcaccgagcag

SEQ ID NO: 11517 - protein, 83 aa, Homo sapiens [sequence omitted]

SEQ ID NO: 11518 - DNA, 626 bp, Homo sapiens
atgcctggggagcacatagagggccacccacaggaaggagacgatccagcgcccactgggttggcagctagcagtgatcacgaggctcagggtgtgtctcctggcccccacctgtcagctgggaaggtgcacctggggcagcttccactgcactcatcacctgccccgctctgcgtggggccggccacacctgccaaagagcaacgcccgcatttgccacaggcccatttggctcccacctcaagcccagcagccaccggggcaggcaggtggtgggcattcttgtttaggcaaggagcctgtagcccaggacgatggcttgacttgcactggtgcctggtcggtcggtcggtcggttggaaccatgccccagttttcccacagacccggggctgaagggttccagtccctgtgctacgcagggatgagacacagactcttgactctctgcaagcagcagcaggggtggggtccactctaagaacttgaacactggcccttgctggcgggagggaatgcttggtacagtccccgaatccctcttgtaacaggtgtagagaaagcctagataactaactagactgaagcagctgctggtgggctggcccctccaagctcaggtggac

SEQ ID NO: 11519 - protein, 131 aa, Homo sapiens; identical to SEQ ID NO: 11489

SEQ ID NO: 11520 - DNA, 947 bp, Homo sapiens
agccatgggaccacaccaccaccaccacaaccaataggccaggaaccaccagagctccggcaaaacctccaggtagtggattggacttggctgatgctttggatgatcaagatgatggccgcaggaaaccgggtataggaggaagagagagatggaaccatgtaaccaccacgaccaagaggccagtaaccaccagagctccagcaaatactttaggaaatgattttgacttggctgatgccctggatgatcgaaatgatcgagatgatggccgcaggaaaccaattgctggaggaggaggtttttcagacaaggatcttgaagacatagtagggggtggagaatacaaacctgacaagggtaaaggtgatggccggtacggcagcaatgacgaccctggatctggtgggtttctgaatcctgaggctcctgttggccatgtgaaaggaaaatgaatctcaggaccccaaaatcactaagccaagggaaaagtcaagctagaaactgcatcaggcaaacgtgcctcccattctactcctaaataagatagctgcaaagatggaaaaagctgcacgcctccctcacaatttgcctacaaagaaatttcttatgggcctcaatatctttaccctaaaacagttctgtgaatttcaccctggcaatacaaactgatagctgatctttacagagggagagagagccgtccctctgctcccctgatacaaatgcatctctggttgcttcctctgcccaattgcttatgtaaaaatgcaggttcactgagccagacaaaattgtgtattcagtgaaaggctgatcaaggactcaaaagaatgcaaccttttgtctctttctcttatctccctatgacctggaagcaccccacctctacccctgctttgagttgtcccacctttctggaccaaaccaatgtacgtcttacacat

SEQ ID NO: 11521 - protein, 36 aa, Homo sapiens [sequence omitted]

SEQ ID NO: 11522 - DNA, 978 bp, Homo sapiens
gcgcgcccgacctccatcttcccggggccgcgccgcgcgcgcgcgcgggctttgggcgggaccctgcagaggcggcggggctcctcctcccgctcctcctcggcctccccttcgggcgctctcgcgctaactgtgctcctccggggccctccgcctgctcccagccatggtggcctggcgctcggcgttccttgtctgcctcgctttctccttggccaccctggtccagcgaggatctggggactttgatgattttaacctggaggatgcagtgaaagaaacttcctcagtaaagcagccatgggaccacaccaccaccaccacaaccaataggccaggaaccaccagagctccggcaaaacctccaggtagtggattggacttggctgatgctttggatgatcaagatgatggccgcaggaaaccgggtataggaggaagagagagatggaaccatgtaaccaccacgaccaagaggccagtaaccaccagagctccagcaaatactttaggaaatgattttgacttggctgatgccctggatgatcgaaatgatcgagatgatggccgcaggaaaccaattgctggaggaggaggtttttcagacaaggatcttgaagacatagtagggggtggagaatacaaacctgacaagggtaaaggtgatggccggtacggcagcaatgacgaccctggatctggtgggtttctgaatcctgaggctcctgttggccatgtgaaaggaaaatgaatctcaggaccccaaaatcactaagccaagggaaaagtcaagctagaaactgcatcaggcaaacgtgcctcccattctactcctaaataagatagctgcaaagatggaaaaagctgcacgcctccctcacaatttgcctacaaagaaatttcttatgggcctcaatatctttaccctaaaacagttctgtgaatttcaccctggcaatacaaactgatagctgatct

SEQ ID NO: 11523 - protein, 194 aa, Homo sapiens
MVAWRSAFLVCLAFSLATLVQRGSGDFDDFNLEDAVKETSSVKQPWDHTTTTTTNRPGTTRAPAKPPGSGLDLADALDDQDDGRRKPGIGGRERWNHVTTTTKRPVTTRAPANTLGNDFDLADALDDRNDRDDGRRKPIAGGGGFSDKDLEDIVGGGEYKPDKGKGDGRYGSNDDPGSGGFLNPEAPVGHVKGK

SEQ ID NO: 11524 - DNA, 423 bp, Homo sapiens
gtgctcctccggggccctccgcctgctcccagccatggtggcctggcgctcggcgttccttgtctgcctcgctttctccttggccaccctggtccagcgaggatctggggactttgatgattttaacctggaggatgcagtgaaagaaacttcctcagtaaagcagagatggaaccatgtaaccaccacgaccaagaggccagtaaccaccagagctccagcaaatactttaggaaatgattttgacttggctgatgccctggatgatcgaaatgatcgagatgatggccgcaggaaaccaattgctggaggaggaggtttttcagacaaggatcttgaagacatagtagggggtggagaatacaaacctgacaagggtaaaggtgatggccggtacggcagcaatgacgaccctggatctgg

SEQ ID NO: 11525 - protein, 128 aa, Homo sapiens
MVAWRSAFLVCLAFSLATLVQRGSGDFDDFNLEDAVKETSSVKQRWNHVTTTTKRPVTTRAPANTLGNDFDLADALDDRNDRDDGRRKPIAGGGGFSDKDLEDIVGGGEYKPDKGKGDGRYGSNDDPG

SEQ ID NO: 11526 - RNA, 82 nt, Homo sapiens
  misc_RNA: miRNA sequence.
ugagcuguuggauucggggccguagcacugucugagagguuuacauuucucacagugaaccggucucuuuuucagcugcuuc

SEQ ID NO: 11527 - RNA, 89 nt, Homo sapiens
  misc_RNA: miRNA sequence.
ggagaggcugugcuguggggcaggcgcaggccugagcccugguuucgggcugccugggucucuggccugcgcgugacuuugggguggcu

SEQ ID NO: 11528 - RNA, 87 nt, Homo sapiens
  misc_RNA: miRNA sequence.
ucucaggcugugucccucuacagggaagcgcuuucuguugucugaaagaaaggaaagugcauccuuuuagaguguuacuguuugaga

SEQ ID NO: 11529 - RNA, 78 nt, Homo sapiens
  misc_RNA: miRNA sequence.
uugugcuuucagcuucuuuacagugcugccuuguagcauucaggucaagcagcauuguacagggcuaugaaagaacca

SEQ ID NO: 11530 - DNA, 21 bp, Homo sapiens
cgctaacaacrgaatacaaag

SEQ ID NO: 11531 - DNA, 21 bp, Homo sapiens
tgcctaggtgytgagggtttt

SEQ ID NO: 11532 - DNA, 21 bp, Homo sapiens
aaaaaacaagraggtggcagt

SEQ ID NO: 11533 - DNA, 21 bp, Homo sapiens
ctcaccaaggyaagttggcat

SEQ ID NO: 11534 - DNA, 21 bp, Homo sapiens
ggtcttatcartcgtcaacct

SEQ ID NO: 11535 - DNA, 21 bp, Homo sapiens
gctgtcgtagrtgcctcctgc

SEQ ID NO: 11536 - DNA, 21 bp, Homo sapiens
ccgagaataayattttactca

SEQ ID NO: 11537 - DNA, 21 bp, Homo sapiens
cgccagcacaygtggcggttt

SEQ ID NO: 11538 - DNA, 21 bp, Homo sapiens
taattcttgaraaggaagctt

SEQ ID NO: 11539 - DNA, 21 bp, Homo sapiens
acgtagctgcmgaagtcaatg

SEQ ID NO: 11540 - DNA, 21 bp, Homo sapiens
acccttcagaygacagaagcg

SEQ ID NO: 11541 - DNA, 21 bp, Homo sapiens
cctgccctggrttccctgctc

SEQ ID NO: 11542 - DNA, 21 bp, Homo sapiens
tgagctcaccrtggttttgga

SEQ ID NO: 11543 - DNA, 21 bp, Homo sapiens
tagtggatgcrtgatcgagac

SEQ ID NO: 11544 - DNA, 21 bp, Homo sapiens
aaatgccctcrtttgattggc

SEQ ID NO: 11545 - DNA, 21 bp, Homo sapiens
cctggtcattrcgtctcctcc

SEQ ID NO: 11546 - DNA, 21 bp, Homo sapiens
ggtgccgagargttgccctcg

SEQ ID NO: 11547 - DNA, 21 bp, Homo sapiens
ctgtaactggmatgcacgcac

SEQ ID NO: 11548 - DNA, 21 bp, Homo sapiens
tggaccagtgmctcgaaacca

SEQ ID NO: 11549 - DNA, 21 bp, Homo sapiens
tgaaaaacagktgtgtcccat

SEQ ID NO: 11550 - DNA, 21 bp, Homo sapiens
caagtgcccgmaagaggaaga

SEQ ID NO: 11551 - DNA, 21 bp, Homo sapiens
ttcttaatttycaagagccca

SEQ ID NO: 11552 - DNA, 21 bp, Homo sapiens
tcagattggaygtggcaaggt

SEQ ID NO: 11553 - DNA, 21 bp, Homo sapiens
cgagccgtgcrgatgagaccc

SEQ ID NO: 11554 - DNA, 21 bp, Homo sapiens
gggaaaacacyggacattatt

SEQ ID NO: 11555 - DNA, 21 bp, Homo sapiens
cactaggacaygtaccccttg

SEQ ID NO: 11556 - DNA, 21 bp, Homo sapiens
taaaaacaacrcatttagcac

SEQ ID NO: 11557 - DNA, 21 bp, Homo sapiens
tttgtcttggrttagtctgtg

SEQ ID NO: 11558 - DNA, 21 bp, Homo sapiens
gtctttttctrtgttggattt

SEQ ID NO: 11559 - DNA, 21 bp, Homo sapiens
tcaagaaagcrtggttaggct

SEQ ID NO: 11560 - DNA, 21 bp, Homo sapiens
ctggggagccrtaagacaggg

SEQ ID NO: 11561 - DNA, 21 bp, Homo sapiens
tggtttttctyttaatttttg

SEQ ID NO: 11562 - DNA, 21 bp, Homo sapiens
cacactgtctyctcatgaaac

SEQ ID NO: 11563 - DNA, 21 bp, Homo sapiens
tcctcctgctrttctggggcc

SEQ ID NO: 11564 - DNA, 21 bp, Homo sapiens
aggatgtgtgrgaacatgggt

SEQ ID NO: 11565 - DNA, 21 bp, Homo sapiens
cacaaagtggygttttgttac

SEQ ID NO: 11566 - DNA, 21 bp, Homo sapiens
tagagagctcyaattcgtctt

SEQ ID NO: 11567 - DNA, 21 bp, Homo sapiens
gaatagaaacrgatacagact

SEQ ID NO: 11568 - DNA, 21 bp, Homo sapiens
ctaggtgcttyttgctggctg

SEQ ID NO: 11569 - DNA, 21 bp, Homo sapiens
gacagtactcrggcaggtaaa

SEQ ID NO: 11570 - DNA, 21 bp, Homo sapiens
aaggcaggggratagaggatt

SEQ ID NO: 11571 - DNA, 21 bp, Homo sapiens
ccatcttcacrtgccttggtt

SEQ ID NO: 11572 - DNA, 21 bp, Homo sapiens
ctacatgaatrtaaatgcatt

SEQ ID NO: 11573 - DNA, 21 bp, Homo sapiens
taaaaacaggmggcctggaac

SEQ ID NO: 11574 - DNA, 21 bp, Homo sapiens
aaccttgtaarggtggtcatc

SEQ ID NO: 11575 - DNA, 21 bp, Homo sapiens
taagcagataygtgcaactgt

SEQ ID NO: 11576 - DNA, 21 bp, Homo sapiens
gattaattttyttacagtact

SEQ ID NO: 11577 - DNA, 21 bp, Homo sapiens
taaatttcacragggtgtggc

SEQ ID NO: 11578 - DNA, 21 bp, Homo sapiens
cacgggtttgragaagagatc

SEQ ID NO: 11579 - DNA, 21 bp, Homo sapiens
gggcactatcrggtgttagca

SEQ ID NO: 11580 - DNA, 21 bp, Homo sapiens
ccctggaagcrggtgctcaca

SEQ ID NO: 11581 - DNA, 21 bp, Homo sapiens
gagacaccaarctgcgtttta

SEQ ID NO: 11582 - DNA, 21 bp, Homo sapiens
caaagtgtccrttgagatgta

SEQ ID NO: 11583 - DNA, 21 bp, Homo sapiens
cctttgtcttrtctcctttct

SEQ ID NO: 11584 - DNA, 21 bp, Homo sapiens
cactgtagtcrggtctatgta

SEQ ID NO: 11585 - DNA, 21 bp, Homo sapiens
taaaggatcartcgtcttggt

SEQ ID NO: 11586 - DNA, 21 bp, Homo sapiens
acttgaaaccyagcagctgtt

SEQ ID NO: 11587 - DNA, 21 bp, Homo sapiens
ttgctttcctrtttgggctca

SEQ ID NO: 11588 - DNA, 21 bp, Homo sapiens
atactggataygctaattacc

SEQ ID NO: 11589 - DNA, 21 bp, Homo sapiens
tcctgtctctrccacctacta

SEQ ID NO: 11590 - DNA, 21 bp, Homo sapiens
gagaatctcarttttcatcag

SEQ ID NO: 11591 - DNA, 21 bp, Homo sapiens
ctggcccctcygagaggtggg

SEQ ID NO: 11592 - DNA, 21 bp, Homo sapiens
aggcagacgcyacccctgtcc

SEQ ID NO: 11593 - DNA, 21 bp, Homo sapiens
acagtgagagkcagggccaga

SEQ ID NO: 11594 - DNA, 21 bp, Homo sapiens
ggttgtccctytattgataca

SEQ ID NO: 11595 - DNA, 21 bp, Homo sapiens
tatgtgctcayttctgctgag

SEQ ID NO: 11596 - DNA, 21 bp, Homo sapiens
acacctctgayggaatgaact

SEQ ID NO: 11597 - DNA, 21 bp, Homo sapiens
attctatgacrgctgaatcac

SEQ ID NO: 11598 - DNA, 21 bp, Homo sapiens
ggagcatgggrgtgataagag

SEQ ID NO: 11599 - DNA, 21 bp, Homo sapiens
gcctctgaggyggtagtgacc

SEQ ID NO: 11600 - DNA, 21 bp, Homo sapiens
gggattggcaycacatttccc

SEQ ID NO: 11601 - DNA, 21 bp, Homo sapiens
agaagaccacrtgctcttcag

SEQ ID NO: 11602 - DNA, 21 bp, Homo sapiens
tgtaggtgatytgggggacac

SEQ ID NO: 11603 - DNA, 21 bp, Homo sapiens
ctgtaggtacrttttgcatcc

SEQ ID NO: 11604 - DNA, 21 bp, Homo sapiens
ccacatccctractagagaca

SEQ ID NO: 11605 - DNA, 21 bp, Homo sapiens
tacagctctayggattttgtc

SEQ ID NO: 11606 - DNA, 21 bp, Homo sapiens
aaaagcacaaygtccagtcaa

SEQ ID NO: 11607 - DNA, 21 bp, Homo sapiens
ctgaacccacmttagatgcgg

SEQ ID NO: 11608 - DNA, 21 bp, Homo sapiens
ccttctagcgytggaaaggga

SEQ ID NO: 11609 - DNA, 21 bp, Homo sapiens
acaggtggggragacaggcat

SEQ ID NO: 11610 - DNA, 21 bp, Homo sapiens
ctgagcctgtyaaaaatctca

SEQ ID NO: 11611 - DNA, 21 bp, Homo sapiens
ccctagaatgmttccagctgc

SEQ ID NO: 11612 - DNA, 21 bp, Homo sapiens
tcccccacccygacccaggca

SEQ ID NO: 11613 - DNA, 21 bp, Homo sapiens
ccagcccaccrtaccctcacc

SEQ ID NO: 11614 - DNA, 21 bp, Homo sapiens
gcattgggacyctatcaggta

SEQ ID NO: 11615 - DNA, 21 bp, Homo sapiens
tcacattagcygtgacaacac

SEQ ID NO: 11616 - DNA, 21 bp, Homo sapiens
tttagaaattmtggactggtg

SEQ ID NO: 11617 - DNA, 21 bp, Homo sapiens
atctccacaaygaaatcaagc

SEQ ID NO: 11618 - DNA, 21 bp, Homo sapiens
catccctagcrtttagaacag

SEQ ID NO: 11619 - DNA, 21 bp, Homo sapiens
ggccattgggktgagagagga

SEQ ID NO: 11620 - DNA, 21 bp, Homo sapiens
gacatcagccrggcatttaac

SEQ ID NO: 11621 - DNA, 21 bp, Homo sapiens
gcagacagagktttgtggatc

SEQ ID NO: 11622 - DNA, 21 bp, Homo sapiens
tttattatttktatctccatc

SEQ ID NO: 11623 - DNA, 21 bp, Homo sapiens
aggccttctcrtcctctgata

SEQ ID NO: 11624 - DNA, 21 bp, Homo sapiens
ctcatttgttytttaggacac

SEQ ID NO: 11625 - DNA, 21 bp, Homo sapiens
tcttggaccaytcctgcaaga

SEQ ID NO: 11626 - DNA, 21 bp, Homo sapiens
ttggattttaytaaattcagg

SEQ ID NO: 11627 - DNA, 21 bp, Homo sapiens
atgtagtaacraatggtgtga

SEQ ID NO: 11628 - DNA, 21 bp, Homo sapiens
ctgtttctgaktcctgggtcc

SEQ ID NO: 11629 - DNA, 21 bp, Homo sapiens
cagaagtggaratggagttaa

SEQ ID NO: 11630 - DNA, 21 bp, Homo sapiens
ctgcttggggrtctgataagg

SEQ ID NO: 11631 - DNA, 21 bp, Homo sapiens
tcttagttttytctgcgcctc

SEQ ID NO: 11632 - DNA, 21 bp, Homo sapiens
cactcccagcrgcactgactg

SEQ ID NO: 11633 - DNA, 21 bp, Homo sapiens
gcaagcttacrtggttcggca

SEQ ID NO: 11634 - DNA, 21 bp, Homo sapiens
tggctatcccrgcatcaactt

SEQ ID NO: 11635 - DNA, 21 bp, Homo sapiens
ccagtcaatarctccctggtt

SEQ ID NO: 11636 - DNA, 21 bp, Homo sapiens
ttagtcccccmcgtgggggta

SEQ ID NO: 11637 - DNA, 21 bp, Homo sapiens
acttcagccamcactgagttg

SEQ ID NO: 11638 - DNA, 21 bp, Homo sapiens
tttcccctggyaccaggatct

SEQ ID NO: 11639 - DNA, 21 bp, Homo sapiens
ggtagaggccrttgagagctt

SEQ ID NO: 11640 - DNA, 21 bp, Homo sapiens
gaccttgctcrtcatccagga

SEQ ID NO: 11641 - DNA, 21 bp, Homo sapiens
cattcactgcytgactgtgtg

SEQ ID NO: 11642 - DNA, 21 bp, Homo sapiens
gggaaggatcrtgattgaggg

SEQ ID NO: 11643 - DNA, 21 bp, Homo sapiens
ggatatttccrggagttcttg

SEQ ID NO: 11644 - DNA, 21 bp, Homo sapiens
ctgtaggaacrttttggccgg

SEQ ID NO: 11645 - DNA, 21 bp, Homo sapiens
ttacattcccygggtccacaa

SEQ ID NO: 11646 - DNA, 21 bp, Homo sapiens
attggagggcrgaccaaagga

SEQ ID NO: 11647 - DNA, 21 bp, Homo sapiens
ttcactcctayatgaagttct

SEQ ID NO: 11648 - DNA, 21 bp, Homo sapiens
gttggcgagtyggctgctatt

SEQ ID NO: 11649 - DNA, 21 bp, Homo sapiens
attttttcacmattttttttt

SEQ ID NO: 11650 - DNA, 21 bp, Homo sapiens
gtattttgtgkttttttttcc

SEQ ID NO: 11651 - DNA, 21 bp, Homo sapiens
aagatctgaartgctataatg

SEQ ID NO: 11652 - DNA, 21 bp, Homo sapiens
gaaaattgatratgatagtag

SEQ ID NO: 11653 - DNA, 21 bp, Homo sapiens
gcctcttaatkccaggctgtg

SEQ ID NO: 11654 - DNA, 21 bp, Homo sapiens
aaatctcatgrttgtaacatg

SEQ ID NO: 11655 - DNA, 21 bp, Homo sapiens
ttgtgtttttraattggtatt

SEQ ID NO: 11656 - DNA, 21 bp, Homo sapiens
cacagtcttgyttggctcttt

SEQ ID NO: 11657 - DNA, 21 bp, Homo sapiens
cctgactcacmacccacccac

SEQ ID NO: 11658 - DNA, 21 bp, Homo sapiens
ttaaattagamatacagaact

SEQ ID NO: 11659 - DNA, 21 bp, Homo sapiens
tttttcccccraacagcaatt

SEQ ID NO: 11660 - DNA, 21 bp, Homo sapiens
tctaggtgacrtttttggcct

SEQ ID NO: 11661 - DNA, 21 bp, Homo sapiens
tggcataagcraggatattct

SEQ ID NO: 11662 - DNA, 21 bp, Homo sapiens
aggcagcaacyccatcagttg

SEQ ID NO: 11663 - DNA, 21 bp, Homo sapiens
tgagggaccayggcgcagagc

SEQ ID NO: 11664 - DNA, 21 bp, Homo sapiens
gacagctggtrccagaatgcc

SEQ ID NO: 11665 - DNA, 21 bp, Homo sapiens
tgttcacaaayccctctcctg

SEQ ID NO: 11666 - DNA, 21 bp, Homo sapiens
cctgcaagtcyacctgggtgt

SEQ ID NO: 11667 - DNA, 21 bp, Homo sapiens
taacttctggytgttctaaga

SEQ ID NO: 11668 - DNA, 21 bp, Homo sapiens
cagatgccacrtttctgttcc

SEQ ID NO: 11669 - DNA, 21 bp, Homo sapiens
tagttgtttgytagtgaaaga

SEQ ID NO: 11670 - DNA, 21 bp, Homo sapiens
ctctgattccyttcagctctg

SEQ ID NO: 11671 - DNA, 21 bp, Homo sapiens
cagttgacacyatgactgcct

SEQ ID NO: 11672 - DNA, 21 bp, Homo sapiens
gcaaacaacamgggttctcca

SEQ ID NO: 11673 - DNA, 21 bp, Homo sapiens
aagaggtcagraaaaaaacca

SEQ ID NO: 11674 - DNA, 21 bp, Homo sapiens
gacaacaagcrctgctctggc

SEQ ID NO: 11675 - DNA, 21 bp, Homo sapiens
gggtggtcagyttttaagggc

SEQ ID NO: 11676 - DNA, 21 bp, Homo sapiens
gacagttggcycaggccctta

SEQ ID NO: 11677 - DNA, 21 bp, Homo sapiens
acagggcttcygcattattca

SEQ ID NO: 11678 - DNA, 21 bp, Homo sapiens
ccaagtgtctytgtgactcca

SEQ ID NO: 11679 - DNA, 21 bp, Homo sapiens
aaactgcctayagaggtagca

SEQ ID NO: 11680 - DNA, 21 bp, Homo sapiens
gcatttggctrgggtagtcgg

SEQ ID NO: 11681 - DNA, 21 bp, Homo sapiens
tactacaaggmgtgcatctgg

SEQ ID NO: 11682 - DNA, 21 bp, Homo sapiens
gtaaattcttytgaatgttga

SEQ ID NO: 11683 - DNA, 21 bp, Homo sapiens
tggtgggggtrggtgtatgga

SEQ ID NO: 11684 - DNA, 21 bp, Homo sapiens
gaggtttaaargagaccatgc

SEQ ID NO: 11685 - DNA, 21 bp, Homo sapiens
atccaagttcrggagcagtct

SEQ ID NO: 11686 - DNA, 21 bp, Homo sapiens
aacattcatgytggatgcagt

SEQ ID NO: 11687 - DNA, 21 bp, Homo sapiens
tctagtgggcyaatccaaaga

SEQ ID NO: 11688 - DNA, 21 bp, Homo sapiens
tatcattctgragccttcttt

SEQ ID NO: 11689 - DNA, 21 bp, Homo sapiens
atgtcatgccyatcactgtgc

SEQ ID NO: 11690 - DNA, 21 bp, Homo sapiens
acagcatcggrggaaggagga

SEQ ID NO: 11691 - DNA, 21 bp, Homo sapiens
aaagatacatraggctgcaca

SEQ ID NO: 11692 - DNA, 21 bp, Homo sapiens
taacatatggyccccaaactc

SEQ ID NO: 11693 - DNA, 21 bp, Homo sapiens
caaagaagtaragtggaattg

SEQ ID NO: 11694 - DNA, 21 bp, Homo sapiens
agctgaggccrgatcaggtaa

SEQ ID NO: 11695 - DNA, 21 bp, Homo sapiens
tatcttgtttkctttcggttt

SEQ ID NO: 11696 - DNA, 21 bp, Homo sapiens
cagagtgtagyatttaattca

SEQ ID NO: 11697 - DNA, 21 bp, Homo sapiens
ggaagggacaytctactagac

SEQ ID NO: 11698 - DNA, 21 bp, Homo sapiens
ggcataatttygaaatgtgtt

SEQ ID NO: 11699 - DNA, 21 bp, Homo sapiens
acataccctgkgaatgattac

SEQ ID NO: 11700 - DNA, 21 bp, Homo sapiens
cgaaaatacayattggggaaa

SEQ ID NO: 11701 - DNA, 21 bp, Homo sapiens
gaagccataarccagagggag

SEQ ID NO: 11702 - DNA, 21 bp, Homo sapiens
tgaggctacaytgagcaggag

SEQ ID NO: 11703 - DNA, 21 bp, Homo sapiens
ccagatctctrctattgaaga

SEQ ID NO: 11704 - DNA, 21 bp, Homo sapiens
ttgaggttttrcaggctatca

SEQ ID NO: 11705 - DNA, 21 bp, Homo sapiens
tgctgtccccraactcctctc

SEQ ID NO: 11706 - DNA, 21 bp, Homo sapiens
tgcaggcacaractgaaatcc

SEQ ID NO: 11707 - DNA, 21 bp, Homo sapiens
gctaaagcaaygaaataaaga

SEQ ID NO: 11708 - DNA, 21 bp, Homo sapiens
tgattaaggakgttgagatga

SEQ ID NO: 11709 - DNA, 21 bp, Homo sapiens
taagctcataytgcagtttac

SEQ ID NO: 11710 - DNA, 21 bp, Homo sapiens
gtaatgtcacyaatttaccag

SEQ ID NO: 11711 - DNA, 21 bp, Homo sapiens
aaactcattartagctcaaaa

SEQ ID NO: 11712 - DNA, 21 bp, Homo sapiens
ctgcaaaggaragatttagaa

SEQ ID NO: 11713 - DNA, 21 bp, Homo sapiens
gagttgctgaktggattttca

SEQ ID NO: 11714 - DNA, 21 bp, Homo sapiens
tatatggtgartcctaacttt

SEQ ID NO: 11715 - DNA, 21 bp, Homo sapiens
cctcgcttatmtgtaagctaa

SEQ ID NO: 11716 - DNA, 21 bp, Homo sapiens
cgtggtaaagrcccactgagt

SEQ ID NO: 11717 - DNA, 21 bp, Homo sapiens
taaggaagtayagcaagatta

SEQ ID NO: 11718 - DNA, 21 bp, Homo sapiens
aaaattttctyaggaaagaac

SEQ ID NO: 11719 - DNA, 21 bp, Homo sapiens
aagtttggacrtgctttacat

SEQ ID NO: 11720 - DNA, 21 bp, Homo sapiens
tgcacataaarccagcttttt

SEQ ID NO: 11721 - DNA, 21 bp, Homo sapiens
tgagagactgkgttatatgct

SEQ ID NO: 11722 - DNA, 21 bp, Homo sapiens
atgtgagggaygggctgctgg

SEQ ID NO: 11723 - DNA, 21 bp, Homo sapiens
cttattttagytgcaaagtgg

SEQ ID NO: 11724 - DNA, 21 bp, Homo sapiens
tacagaagccyagggtcatgt

SEQ ID NO: 11725 - DNA, 21 bp, Homo sapiens
taaggctgggraaattagcct

SEQ ID NO: 11726 - DNA, 21 bp, Homo sapiens
tagggtgagcrtacttaaaac

SEQ ID NO: 11727 - DNA, 21 bp, Homo sapiens
tctcgctacgyaaaaaggaaa

SEQ ID NO: 11728 - DNA, 21 bp, Homo sapiens
aagagcaatcyataaaatgaa

SEQ ID NO: 11729 - DNA, 21 bp, Homo sapiens
cttcctctcaygtatatgcct

SEQ ID NO: 11730 - DNA, 21 bp, Homo sapiens
aagatagatakgtgtccatat

SEQ ID NO: 11731 - DNA, 21 bp, Homo sapiens
gaatcagccayggagactaat

SEQ ID NO: 11732 - DNA, 21 bp, Homo sapiens
tcattcttacrtgctcttcct

SEQ ID NO: 11733 - DNA, 21 bp, Homo sapiens
tttccatttgktaataaatac

SEQ ID NO: 11734 - DNA, 21 bp, Homo sapiens
ggacggccagraaaatgaatt

SEQ ID NO: 11735 - DNA, 21 bp, Homo sapiens
tcagagagacraggacttatc

SEQ ID NO: 11736 - DNA, 21 bp, Homo sapiens
aacaagcatcrttgtgggtcc

SEQ ID NO: 11737 - DNA, 21 bp, Homo sapiens
agtcagtttarttacactgag

SEQ ID NO: 11738 - DNA, 21 bp, Homo sapiens
agttaaaaccrttatgctgaa

SEQ ID NO: 11739 - DNA, 21 bp, Homo sapiens
tcagcttctgmttttgcagcc

SEQ ID NO: 11740 - DNA, 21 bp, Homo sapiens
attctgtactrtaatggttgc

SEQ ID NO: 11741 - DNA, 21 bp, Homo sapiens
agaagactcayttagtttctg

SEQ ID NO: 11742 - DNA, 21 bp, Homo sapiens
acaggttgggygtaactaaat

SEQ ID NO: 11743 - DNA, 21 bp, Homo sapiens
gtacttctcaycttctatttg

SEQ ID NO: 11744 - DNA, 21 bp, Homo sapiens
caggtgtttargtttttggat

SEQ ID NO: 11745 - DNA, 21 bp, Homo sapiens
ctgaggaaaakactccacccc

SEQ ID NO: 11746 - DNA, 21 bp, Homo sapiens
ggtggattgayagtgtgtgtg

SEQ ID NO: 11747 - DNA, 21 bp, Homo sapiens
aagttcttgtytcacttaggt

SEQ ID NO: 11748 - DNA, 21 bp, Homo sapiens
ttgaggctaargacagtttca

SEQ ID NO: 11749 - DNA, 21 bp, Homo sapiens
agttactggcrcaggaataga

SEQ ID NO: 11750 - DNA, 21 bp, Homo sapiens
ctacccaaaaytactcccaag

SEQ ID NO: 11751 - DNA, 21 bp, Homo sapiens
aaaccattctmaattccagtt

SEQ ID NO: 11752 - DNA, 21 bp, Homo sapiens
aaaagattagygaattcctat

SEQ ID NO: 11753 - DNA, 21 bp, Homo sapiens
cttcactttgrgacccagttc

SEQ ID NO: 11754 - DNA, 21 bp, Homo sapiens
gaagcggccaratcctcctgt

SEQ ID NO: 11755 - DNA, 21 bp, Homo sapiens
atttcacctgyggtgattttg

SEQ ID NO: 11756 - DNA, 21 bp, Homo sapiens
aaatctcttgrtagggcagcc

SEQ ID NO: 11757 - DNA, 21 bp, Homo sapiens
gcaaaagcagytggatgtgtc

SEQ ID NO: 11758 - DNA, 21 bp, Homo sapiens
agtgaacagaygaggaaatgg

SEQ ID NO: 11759 - DNA, 21 bp, Homo sapiens
catcagggagmactgggggac

SEQ ID NO: 11760 - DNA, 21 bp, Homo sapiens
ggctcaggacrgttcagactg

SEQ ID NO: 11761 - DNA, 21 bp, Homo sapiens
atgcaaatcaraacatggtta

SEQ ID NO: 11762 - DNA, 21 bp, Homo sapiens
ggtaaactggytcaagcaagc

SEQ ID NO: 11763 - DNA, 21 bp, Homo sapiens
agtcctacccrtaaacataca

SEQ ID NO: 11764 - DNA, 21 bp, Homo sapiens
caaggggaaaytggctgtcaa

SEQ ID NO: 11765 - DNA, 21 bp, Homo sapiens
tgtggagtcayggttatcaag

SEQ ID NO: 11766 - DNA, 21 bp, Homo sapiens
ctgggccattrttcccaccca

SEQ ID NO: 11767 - DNA, 21 bp, Homo sapiens
ttgggggtgayggtagtggtg

SEQ ID NO: 11768 - DNA, 21 bp, Homo sapiens
ccagggcttayacaaagtgca

SEQ ID NO: 11769 - DNA, 21 bp, Homo sapiens
gagggtggaaygaagacattt

SEQ ID NO: 11770 - DNA, 21 bp, Homo sapiens
tttgcacttgmattaatgacg

SEQ ID NO: 11771 - DNA, 21 bp, Homo sapiens
tctttaagtcmagccttgagg

SEQ ID NO: 11772 - DNA, 21 bp, Homo sapiens
aacctgtattytttcggctgc

SEQ ID NO: 11773 - DNA, 21 bp, Homo sapiens
gttggaagagygatcatcatt

SEQ ID NO: 11774 - DNA, 21 bp, Homo sapiens
acaaataagtyagcttataag

SEQ ID NO: 11775 - DNA, 21 bp, Homo sapiens
cacagacgcargggtccttgg

SEQ ID NO: 11776 - DNA, 21 bp, Homo sapiens
tttaagggtaycttccaataa

SEQ ID NO: 11777 - DNA, 21 bp, Homo sapiens
tagttttaggrttattagtca

SEQ ID NO: 11778 - DNA, 21 bp, Homo sapiens
agagatgagcrtggggatcac

SEQ ID NO: 11779 - DNA, 21 bp, Homo sapiens
ctttttccttytctccttcct

SEQ ID NO: 11780 - DNA, 21 bp, Homo sapiens
ggagactatgrtgccaacctg

SEQ ID NO: 11781 - DNA, 21 bp, Homo sapiens
agaaagcattycctgaattgg

SEQ ID NO: 11782 - DNA, 21 bp, Homo sapiens
gtcttggcttycatgatattt

SEQ ID NO: 11783 - DNA, 21 bp, Homo sapiens
ttactgggaamatgatcagcc

SEQ ID NO: 11784 - DNA, 21 bp, Homo sapiens
tctcatgaccyaactttctga

SEQ ID NO: 11785 - DNA, 21 bp, Homo sapiens
gaaagctttakgggtcttgca

SEQ ID NO: 11786 - DNA, 21 bp, Homo sapiens
gaatgtatgtmcctgccaaat

SEQ ID NO: 11787 - DNA, 21 bp, Homo sapiens
tgtggctactytacatctttc

SEQ ID NO: 11788 - DNA, 21 bp, Homo sapiens
acttaattttrtttagtagga

SEQ ID NO: 11789 - DNA, 21 bp, Homo sapiens
gccaatagcayggtgaagggc

SEQ ID NO: 11790 - DNA, 21 bp, Homo sapiens
tgagcactgcytattgcattt

SEQ ID NO: 11791 - DNA, 21 bp, Homo sapiens
cctctgctacytacacacaca

SEQ ID NO: 11792 - DNA, 21 bp, Homo sapiens
aataattatartattcatgaa

SEQ ID NO: 11793 - DNA, 21 bp, Homo sapiens
ccagatatgayacagaaaaca

SEQ ID NO: 11794 - DNA, 21 bp, Homo sapiens
tttttaaccartttccaagaa

SEQ ID NO: 11795 - DNA, 21 bp, Homo sapiens
ggccttcttcygaccttcagc

SEQ ID NO: 11796 - DNA, 21 bp, Homo sapiens
tcttcacttayctaagccctg

SEQ ID NO: 11797 - DNA, 21 bp, Homo sapiens
acagagttgtyatataatttc

SEQ ID NO: 11798 - DNA, 21 bp, Homo sapiens
tgaagcacagrgaaaaaaaag

SEQ ID NO: 11799 - DNA, 21 bp, Homo sapiens
ggtctttctcrccctctacat

SEQ ID NO: 11800 - DNA, 21 bp, Homo sapiens
ccaatttggakaataccaaag

SEQ ID NO: 11801 - DNA, 21 bp, Homo sapiens
acagtgtgcayggtcaataga

SEQ ID NO: 11802 - DNA, 21 bp, Homo sapiens
cacgatgtgaygtaattaaat

SEQ ID NO: 11803 - DNA, 21 bp, Homo sapiens
tcagtaactayattaaagaga

SEQ ID NO: 11804 - DNA, 21 bp, Homo sapiens
gtattttcagrtctaagatag

SEQ ID NO: 11805 - DNA, 21 bp, Homo sapiens
agtaacatccygaaaaatttt

SEQ ID NO: 11806 - DNA, 21 bp, Homo sapiens
tgcatcagtaytctgaagggt

SEQ ID NO: 11807 - DNA, 21 bp, Homo sapiens
ttaaaggatgygcaaggagga

SEQ ID NO: 11808 - DNA, 21 bp, Homo sapiens
gccagcccatrtcattggcag

SEQ ID NO: 11809 - DNA, 21 bp, Homo sapiens
ccacacagatrttcttttttg

SEQ ID NO: 11810 - DNA, 21 bp, Homo sapiens
tactgtgtggrgagggaaagt

SEQ ID NO: 11811 - DNA, 21 bp, Homo sapiens
tgtgttgcgtyagatctggag

SEQ ID NO: 11812 - DNA, 21 bp, Homo sapiens
tagcttccctraaaatagtaa

SEQ ID NO: 11813 - DNA, 21 bp, Homo sapiens
tcatcagaacmaaatctgcta

SEQ ID NO: 11814 - DNA, 21 bp, Homo sapiens
agggttagcartttgtcctca

SEQ ID NO: 11815 - DNA, 21 bp, Homo sapiens
aactggttctycttctagtgc

SEQ ID NO: 11816 - DNA, 21 bp, Homo sapiens
caatgagtatygtgtggtggt

SEQ ID NO: 11817 - DNA, 21 bp, Homo sapiens
ggtcgattgtkcagtgcttga

SEQ ID NO: 11818 - DNA, 21 bp, Homo sapiens
ctgctcctatmctcacccttc

SEQ ID NO: 11819 - DNA, 21 bp, Homo sapiens
atagacttctrgctgacattt

SEQ ID NO: 11820 - DNA, 21 bp, Homo sapiens
tgttactgtaygggaatccta

SEQ ID NO: 11821 - DNA, 21 bp, Homo sapiens
aggtgataatraatcatgtgt

SEQ ID NO: 11822 - DNA, 21 bp, Homo sapiens
ctgtttcaatrgtaaatccct

SEQ ID NO: 11823 - DNA, 21 bp, Homo sapiens
cctgctcgacrttgatccact

SEQ ID NO: 11824 - DNA, 21 bp, Homo sapiens
aaattctcccrtttggatccc

SEQ ID NO: 11825 - DNA, 21 bp, Homo sapiens
gaaaacacatrttgtcaggag

SEQ ID NO: 11826 - DNA, 21 bp, Homo sapiens
agtgattagarcatagagtga

SEQ ID NO: 11827 - DNA, 21 bp, Homo sapiens
gaagagatgtrtattgtccac

SEQ ID NO: 11828 - DNA, 21 bp, Homo sapiens
cccacctcttycccaatatct

SEQ ID NO: 11829 - DNA, 21 bp, Homo sapiens
aatttttccayatgaaagtca

SEQ ID NO: 11830 - DNA, 21 bp, Homo sapiens
ttgcttatttkctaaccaata

SEQ ID NO: 11831 - DNA, 21 bp, Homo sapiens
aaacatacacmtattttaaaa

SEQ ID NO: 11832 - DNA, 21 bp, Homo sapiens
gctatagacgrtaaatagata

SEQ ID NO: 11833 - DNA, 21 bp, Homo sapiens
acttggtgccrtgactaatct

SEQ ID NO: 11834 - DNA, 21 bp, Homo sapiens
aagggcagcaragtgaagtgc

SEQ ID NO: 11835 - DNA, 21 bp, Homo sapiens
gggatgctggygggttagcac

SEQ ID NO: 11836 - DNA, 21 bp, Homo sapiens
aactgatgggycgagcctgct

SEQ ID NO: 11837 - DNA, 21 bp, Homo sapiens
tgccagtctarcctactttgg

SEQ ID NO: 11838 - DNA, 21 bp, Homo sapiens
actaaggacgrctagactgat

SEQ ID NO: 11839 - DNA, 21 bp, Homo sapiens
actttgcttcyaattacagct

SEQ ID NO: 11840 - DNA, 21 bp, Homo sapiens
aaggagattcycggatctcag

SEQ ID NO: 11841 - DNA, 21 bp, Homo sapiens
ctagatttacrtagttcggct

SEQ ID NO: 11842 - DNA, 21 bp, Homo sapiens
tattaattaaragagaaatct

SEQ ID NO: 11843 - DNA, 21 bp, Homo sapiens
gaacagacaargagtggccca

SEQ ID NO: 11844 - DNA, 21 bp, Homo sapiens
cattaacaggygaaggaccaa

SEQ ID NO: 11845 - DNA, 21 bp, Homo sapiens
tcactgccttyggataaattc

SEQ ID NO: 11846 - DNA, 21 bp, Homo sapiens
tgatctggctrctgggcttgc

SEQ ID NO: 11847 - DNA, 21 bp, Homo sapiens
aagttttctayttctcagtgt

SEQ ID NO: 11848 - DNA, 21 bp, Homo sapiens
gtagttcccckatcctaagtt

SEQ ID NO: 11849 - DNA, 21 bp, Homo sapiens
tatgggactayttgttgcaaa

SEQ ID NO: 11850 - DNA, 21 bp, Homo sapiens
agaggcaatgytaacactaat

SEQ ID NO: 11851 - DNA, 21 bp, Homo sapiens
aacactatacrttgctcaagg

SEQ ID NO: 11852 - DNA, 21 bp, Homo sapiens
gttatgccagkaatattcccc

SEQ ID NO: 11853 - DNA, 21 bp, Homo sapiens
agcatgttgamgaaagatcct

SEQ ID NO: 11854 - DNA, 21 bp, Homo sapiens
cagtctttgayatcaatctaa

SEQ ID NO: 11855 - DNA, 21 bp, Homo sapiens
agtcattgtcytgaatccttc

SEQ ID NO: 11856 - DNA, 21 bp, Homo sapiens
cttggactgtmcttggaagat

SEQ ID NO: 11857 - DNA, 21 bp, Homo sapiens
catctttggcygaacattatg

SEQ ID NO: 11858 - DNA, 21 bp, Homo sapiens
aacagacacarctgtcatcaa

SEQ ID NO: 11859 - DNA, 21 bp, Homo sapiens
gtagtctacayacactacaag

SEQ ID NO: 11860 - DNA, 21 bp, Homo sapiens
gaaattagtargggaccagct

SEQ ID NO: 11861 - DNA, 21 bp, Homo sapiens
agggcctctarggctacactc

SEQ ID NO: 11862 - DNA, 21 bp, Homo sapiens
attgacccttkaacaacacaa

SEQ ID NO: 11863 - DNA, 21 bp, Homo sapiens
ttacctccaayatacacacat

SEQ ID NO: 11864 - DNA, 21 bp, Homo sapiens
gccttggtgcrgaagcagcta

SEQ ID NO: 11865 - DNA, 21 bp, Homo sapiens
ttgataattgyggctgtgtaa

SEQ ID NO: 11866 - DNA, 21 bp, Homo sapiens
aggagtggggyaggcccaatg

SEQ ID NO: 11867 - DNA, 21 bp, Homo sapiens
agccataacayactacctaga

SEQ ID NO: 11868 - DNA, 21 bp, Homo sapiens
ctgcagcatcygggaaagtaa

SEQ ID NO: 11869 - DNA, 21 bp, Homo sapiens
agggagacagygtgacttggg

SEQ ID NO: 11870 - DNA, 21 bp, Homo sapiens
atgaaatatcytatgtggtca

SEQ ID NO: 11871 - DNA, 21 bp, Homo sapiens
tgtaggcaagrgaacattcac

SEQ ID NO: 11872 - DNA, 21 bp, Homo sapiens
gctgtggataygtcttttgtg

SEQ ID NO: 11873 - DNA, 21 bp, Homo sapiens
gcctgttagarggtctgataa

SEQ ID NO: 11874 - DNA, 21 bp, Homo sapiens
ccccaccccaytcaaatctca

SEQ ID NO: 11875 - DNA, 21 bp, Homo sapiens
ttgttgtaaaraaaagggaac

SEQ ID NO: 11876 - DNA, 21 bp, Homo sapiens
gcaagggtgtrattatattga

SEQ ID NO: 11877 - DNA, 21 bp, Homo sapiens
gagaaacgctrcaagacgcta

SEQ ID NO: 11878 - DNA, 21 bp, Homo sapiens
cccacgcaagmcttgtaggtg

SEQ ID NO: 11879 - DNA, 21 bp, Homo sapiens
tctgttttctytatttctcca

SEQ ID NO: 11880 - DNA, 21 bp, Homo sapiens
aatgtcttgarctttgcattt

SEQ ID NO: 11881 - DNA, 21 bp, Homo sapiens
aaaaatcagaygtaaatagtg

SEQ ID NO: 11882 - DNA, 21 bp, Homo sapiens
tcacacaggcmatgccataac

SEQ ID NO: 11883 - DNA, 21 bp, Homo sapiens
ggattagttaytgtgaaaagg

SEQ ID NO: 11884 - DNA, 21 bp, Homo sapiens
cacttaaaagrcaagataagc

SEQ ID NO: 11885 - DNA, 21 bp, Homo sapiens
ctactattctmtatgaatcac

SEQ ID NO: 11886 - DNA, 21 bp, Homo sapiens
caatagttccyattttccaca

SEQ ID NO: 11887 - DNA, 21 bp, Homo sapiens
ttattatacarcagtttgcag

SEQ ID NO: 11888 - DNA, 21 bp, Homo sapiens
ttttctgtccytattgcctta

SEQ ID NO: 11889 - DNA, 21 bp, Homo sapiens
ctttgcctgtrgaaggctttc

SEQ ID NO: 11890 - DNA, 21 bp, Homo sapiens
aggaaggattytattgctgat

SEQ ID NO: 11891 - DNA, 21 bp, Homo sapiens
aaaatgcattmttctgaagtt

SEQ ID NO: 11892 - DNA, 21 bp, Homo sapiens
tttcacagctraaatcataag

SEQ ID NO: 11893 - DNA, 21 bp, Homo sapiens
attacaaggayaatgatagca

SEQ ID NO: 11894 - DNA, 21 bp, Homo sapiens
aaatgtcaaaytatatgaagt

SEQ ID NO: 11895 - DNA, 21 bp, Homo sapiens
tttcttctcaytgacttcctt

SEQ ID NO: 11896 - DNA, 21 bp, Homo sapiens
gggagtaattmtggatatgga

SEQ ID NO: 11897 - DNA, 21 bp, Homo sapiens
gccatggccarggtcaatacc

SEQ ID NO: 11898 - DNA, 21 bp, Homo sapiens
tgtaagaacaytatgctcacg

SEQ ID NO: 11899 - DNA, 21 bp, Homo sapiens
tcctcatccaygtactaagca

SEQ ID NO: 11900 - DNA, 21 bp, Homo sapiens
ttttaaagcamgtatgactgg

SEQ ID NO: 11901 - DNA, 21 bp, Homo sapiens
aaataaagctyatctgtgcta

SEQ ID NO: 11902 - DNA, 21 bp, Homo sapiens
atgaacttcayacatacgaaa

SEQ ID NO: 11903 - DNA, 21 bp, Homo sapiens
ttttaatctcrtctttataat

SEQ ID NO: 11904 - DNA, 21 bp, Homo sapiens
acattcagcaycatagtggat

SEQ ID NO: 11905 - DNA, 21 bp, Homo sapiens
atcaactaaayctttatgtca

SEQ ID NO: 11906 - DNA, 21 bp, Homo sapiens
ggctaaatgaytttcctatgg

SEQ ID NO: 11907 - DNA, 21 bp, Homo sapiens
tatttctcatmggctaggctt

SEQ ID NO: 11908 - DNA, 21 bp, Homo sapiens
aaacggcagcyatgctcactc

SEQ ID NO: 11909 - DNA, 21 bp, Homo sapiens
ctctagttttrtcccatatgg

SEQ ID NO: 11910 - DNA, 21 bp, Homo sapiens
ctcctcttacrctctagacca

SEQ ID NO: 11911 - DNA, 21 bp, Homo sapiens
aacggggcagrtagaaggagg

SEQ ID NO: 11912 - DNA, 21 bp, Homo sapiens
ttgtctataaygctaaagaat

SEQ ID NO: 11913 - DNA, 21 bp, Homo sapiens
aataagtcaamttttagctat

SEQ ID NO: 11914 - DNA, 21 bp, Homo sapiens
ggtaaatccayaattatgtaa

SEQ ID NO: 11915 - DNA, 21 bp, Homo sapiens
aaccttagaartattgaggca

SEQ ID NO: 11916 - DNA, 21 bp, Homo sapiens
aatctgaggcytatggtgatg

SEQ ID NO: 11917 - DNA, 21 bp, Homo sapiens
cttaagtttayatgtaaccat

SEQ ID NO: 11918 - DNA, 21 bp, Homo sapiens
tctaggttggytcattacaag

SEQ ID NO: 11919 - DNA, 21 bp, Homo sapiens
cagtgcagcaractctcatgt

SEQ ID NO: 11920 - DNA, 21 bp, Homo sapiens
ggggggaggtygtttcatcag

SEQ ID NO: 11921 - DNA, 21 bp, Homo sapiens
acctatattayattattaaaa

SEQ ID NO: 11922 - DNA, 21 bp, Homo sapiens
atcagtgggayctaatgccat

SEQ ID NO: 11923 - DNA, 21 bp, Homo sapiens
tcaagaagtcrtagttgggat

SEQ ID NO: 11924 - DNA, 21 bp, Homo sapiens
aaattacttaygactatatga

SEQ ID NO: 11925 - DNA, 21 bp, Homo sapiens
ctttcatttaygaagaagacc

SEQ ID NO: 11926 - DNA, 21 bp, Homo sapiens
cttttctgaartgtttgtgcc

SEQ ID NO: 11927 - DNA, 21 bp, Homo sapiens
ctactcttttragagcagcaa

SEQ ID NO: 11928 - DNA, 21 bp, Homo sapiens
ttacgagaagrggcatgttct

SEQ ID NO: 11929 - DNA, 21 bp, Homo sapiens
tcattctaaaytctactgtgc

SEQ ID NO: 11930 - DNA, 21 bp, Homo sapiens
aagatcaaacytctaggacct

SEQ ID NO: 11931 - DNA, 21 bp, Homo sapiens
tgcaggagatycagaggacag

SEQ ID NO: 11932 - DNA, 21 bp, Homo sapiens
cattttttgcygtgctgaaaa

SEQ ID NO: 11933 - DNA, 21 bp, Homo sapiens
tttgttttaayatatggtatt

SEQ ID NO: 11934 - DNA, 21 bp, Homo sapiens
gttataacgaygtcttcctgg

SEQ ID NO: 11935 - DNA, 21 bp, Homo sapiens
agatttgagakgcaggttaat

SEQ ID NO: 11936 - DNA, 21 bp, Homo sapiens
aaaaaccgcaratgtccactt

SEQ ID NO: 11937 - DNA, 21 bp, Homo sapiens
ttaacagattygaagacttgt

SEQ ID NO: 11938 - DNA, 21 bp, Homo sapiens
gatttgtcaaygaatatatag

SEQ ID NO: 11939 - DNA, 21 bp, Homo sapiens
tagaacagggyacatgagcat

SEQ ID NO: 11940 - DNA, 21 bp, Homo sapiens
tcatgtatacrcttctttgtt

SEQ ID NO: 11941 - DNA, 21 bp, Homo sapiens
tcatgaaactrcgtggcagca

SEQ ID NO: 11942 - DNA, 21 bp, Homo sapiens
atttcctttcyggttaattat

SEQ ID NO: 11943 - DNA, 21 bp, Homo sapiens
gttatgcctargtgataaaat

SEQ ID NO: 11944 - DNA, 21 bp, Homo sapiens
gagctcatgayggtttctaac

SEQ ID NO: 11945 - DNA, 21 bp, Homo sapiens
atttccagggkctctgaatag

SEQ ID NO: 11946 - DNA, 21 bp, Homo sapiens
tcctcaaatayagtttttgca

SEQ ID NO: 11947 - DNA, 21 bp, Homo sapiens
tagtcatttgraccactaacc

SEQ ID NO: 11948 - DNA, 21 bp, Homo sapiens
cctcctacaaraagctgtgat

SEQ ID NO: 11949 - DNA, 21 bp, Homo sapiens
gtaagtttccrcatagttcac

SEQ ID NO: 11950 - DNA, 21 bp, Homo sapiens
tcatcatcccycgactgtctg

SEQ ID NO: 11951 - DNA, 21 bp, Homo sapiens
cctttgggacratttggaaca

SEQ ID NO: 11952 - DNA, 21 bp, Homo sapiens
attatgaatgytcagtgaaaa

SEQ ID NO: 11953 - DNA, 21 bp, Homo sapiens
tactccagccrctgtcatggg

SEQ ID NO: 11954 - DNA, 21 bp, Homo sapiens
caaaagaccaygacggcagca

SEQ ID NO: 11955 - DNA, 21 bp, Homo sapiens
gttttaactcrcacctgtttc

SEQ ID NO: 11956 - DNA, 21 bp, Homo sapiens
cttgttttgtyttgtgtttag

SEQ ID NO: 11957 - DNA, 21 bp, Homo sapiens
agattgactgyctctcacagg

SEQ ID NO: 11958 - DNA, 21 bp, Homo sapiens
aaagaatcctrctggaaagga

SEQ ID NO: 11959 - DNA, 21 bp, Homo sapiens
cctaatagttktgtatagtgg

SEQ ID NO: 11960 - DNA, 21 bp, Homo sapiens
acttattctgragggttgtat

SEQ ID NO: 11961 - DNA, 21 bp, Homo sapiens
aaccattaggkatataaaacc

SEQ ID NO: 11962 - DNA, 21 bp, Homo sapiens
agctcacctgyatgccgccaa

SEQ ID NO: 11963 - DNA, 21 bp, Homo sapiens
atggcagtacmtctgacatcc

SEQ ID NO: 11964 - DNA, 21 bp, Homo sapiens
cacaaggtggyaagatgaaaa

SEQ ID NO: 11965 - DNA, 21 bp, Homo sapiens
tgcgcctcccraaacagtgct

SEQ ID NO: 11966 - DNA, 21 bp, Homo sapiens
taccaatgaaytgggccattt

SEQ ID NO: 11967 - DNA, 21 bp, Homo sapiens
tgttgaatagygtatgcacag

SEQ ID NO: 11968 - DNA, 21 bp, Homo sapiens
gtcatgatagmcctggcacaa

SEQ ID NO: 11969 - DNA, 21 bp, Homo sapiens
gccagtctgcytaggttgagt

SEQ ID NO: 11970 - DNA, 21 bp, Homo sapiens
acctcaggtaygagtagaatg

SEQ ID NO: 11971 - DNA, 21 bp, Homo sapiens
atccgaaatcrctaagaaata

SEQ ID NO: 11972 - DNA, 21 bp, Homo sapiens
atggcagtttrtaagatggga

SEQ ID NO: 11973 - DNA, 21 bp, Homo sapiens
atgcacatttrgtaaagggtg

SEQ ID NO: 11974 - DNA, 21 bp, Homo sapiens
tatggtcgttyttaaaacaaa

SEQ ID NO: 11975 - DNA, 21 bp, Homo sapiens
gaccagccctkcagaggcttc

SEQ ID NO: 11976 - DNA, 21 bp, Homo sapiens
accataacacktcggtacatg

SEQ ID NO: 11977 - DNA, 21 bp, Homo sapiens
ccagtgatttratcattcatg

SEQ ID NO: 11978 - DNA, 21 bp, Homo sapiens
catagacaccygaaacctgga

SEQ ID NO: 11979 - DNA, 21 bp, Homo sapiens
ctgatagaaaygctaacctct

SEQ ID NO: 11980 - DNA, 21 bp, Homo sapiens
gatttcaagaytgactgattc

SEQ ID NO: 11981 - DNA, 21 bp, Homo sapiens
tttgcatcagrttgcctgtgt

SEQ ID NO: 11982 - DNA, 21 bp, Homo sapiens
gaaaggtggtrgtcatcggaa

SEQ ID NO: 11983 - DNA, 21 bp, Homo sapiens
cccttctgggkctgcgactgc

SEQ ID NO: 11984 - DNA, 21 bp, Homo sapiens
aacccctcggyaggcttccta

SEQ ID NO: 11985 - DNA, 21 bp, Homo sapiens
cccctctcacrgtagtgctat

SEQ ID NO: 11986 - DNA, 21 bp, Homo sapiens
tgtgggtgtartgacactggg

SEQ ID NO: 11987 - DNA, 21 bp, Homo sapiens
acagcagaagytgttttgaaa

SEQ ID NO: 11988 - DNA, 21 bp, Homo sapiens
tcttcttggcrcttgcctcct

SEQ ID NO: 11989 - DNA, 21 bp, Homo sapiens
gtcttgctgtyatctttgcca

SEQ ID NO: 11990 - DNA, 21 bp, Homo sapiens
cctatgaactrttgccctgga

SEQ ID NO: 11991 - DNA, 21 bp, Homo sapiens
gagcctcatamctttgtccaa

SEQ ID NO: 11992 - DNA, 21 bp, Homo sapiens
tttttctctcraactttgggt

SEQ ID NO: 11993 - DNA, 21 bp, Homo sapiens
cctaataccamtgacagacca

SEQ ID NO: 11994 - DNA, 21 bp, Homo sapiens
actatgtgaaycacgaaagaa

SEQ ID NO: 11995 - DNA, 21 bp, Homo sapiens
tcacaaccaaytgcatgataa

SEQ ID NO: 11996 - DNA, 21 bp, Homo sapiens
gatcatgtatraaaacattac

SEQ ID NO: 11997 - DNA, 21 bp, Homo sapiens
acagtactttytaggcagagg

SEQ ID NO: 11998 - DNA, 21 bp, Homo sapiens
ctgcctctctyaggtgaagac

SEQ ID NO: 11999 - DNA, 21 bp, Homo sapiens
gtagtaatctkatctactaaa

SEQ ID NO: 12000 - DNA, 21 bp, Homo sapiens
aatttgtattygttgttttat

SEQ ID NO: 12001 - DNA, 21 bp, Homo sapiens
agaaacaaacraggagatgcc

SEQ ID NO: 12002 - DNA, 21 bp, Homo sapiens
actgtgggaaygttatcaaag

SEQ ID NO: 12003 - DNA, 21 bp, Homo sapiens
ttaagaccacrtattagttag

SEQ ID NO: 12004 - DNA, 21 bp, Homo sapiens
caccagggatyggaaaatact

SEQ ID NO: 12005 - DNA, 21 bp, Homo sapiens
tatttcagtcrtgaccctggc

SEQ ID NO: 12006 - DNA, 21 bp, Homo sapiens
gttgataacaygatagtacaa

SEQ ID NO: 12007 - DNA, 21 bp, Homo sapiens
gccatcagtartgtgaaaacg

SEQ ID NO: 12008 - DNA, 21 bp, Homo sapiens
cagatcacaargccctgctgg

SEQ ID NO: 12009 - DNA, 21 bp, Homo sapiens
tgagaaagacrtgagttctgt

SEQ ID NO: 12010 - DNA, 21 bp, Homo sapiens
ctctgtctccygagagcccct

SEQ ID NO: 12011 - DNA, 21 bp, Homo sapiens
aacatctgacrgtgtatgggt

SEQ ID NO: 12012 - DNA, 21 bp, Homo sapiens
ttattagtgaygtgcttttcc

SEQ ID NO: 12013 - DNA, 21 bp, Homo sapiens
tgcactggctytctggaggat

SEQ ID NO: 12014 - DNA, 21 bp, Homo sapiens
agacagaagaygtaggctatg

SEQ ID NO: 12015 - DNA, 21 bp, Homo sapiens
ggaggaagagygttcagacag

SEQ ID NO: 12016 - DNA, 21 bp, Homo sapiens
acatcaacctkgcagaagagg

SEQ ID NO: 12017 - DNA, 21 bp, Homo sapiens
tgttagagtcrtggtctccaa

SEQ ID NO: 12018 - DNA, 21 bp, Homo sapiens
ttcttctgcakcctcttcatg

SEQ ID NO: 12019 - DNA, 21 bp, Homo sapiens
caggtgcatckgaactgcagg

SEQ ID NO: 12020 - DNA, 21 bp, Homo sapiens
tactagtctcyctatgtttgt

SEQ ID NO: 12021 - DNA, 21 bp, Homo sapiens
gcctcggaggygttaatgaca

SEQ ID NO: 12022 - DNA, 21 bp, Homo sapiens
tgccagtcatyggctgctgct

SEQ ID NO: 12023 - DNA, 21 bp, Homo sapiens
ctctgatgcamtgtgacctgg

SEQ ID NO: 12024 - DNA, 21 bp, Homo sapiens
ctctttccaartctcatctgt

SEQ ID NO: 12025 - DNA, 21 bp, Homo sapiens
tttcaccttaygtttcctttg

SEQ ID NO: 12026 - DNA, 21 bp, Homo sapiens
tccagtggagmcttaaggaac

SEQ ID NO: 12027 - DNA, 21 bp, Homo sapiens
acactggcccyaagacctcag

SEQ ID NO: 12028 - DNA, 21 bp, Homo sapiens
ccttcaagacyactttcgggt

SEQ ID NO: 12029 - DNA, 21 bp, Homo sapiens
gccagaccatyccacagttcc

SEQ ID NO: 12030 - DNA, 21 bp, Homo sapiens
gtctgctactraccgctgatg

SEQ ID NO: 12031 - DNA, 21 bp, Homo sapiens
ttcttccctcyctattttatg

SEQ ID NO: 12032 - DNA, 21 bp, Homo sapiens
gtgctttatcyactgacttac

SEQ ID NO: 12033 - DNA, 21 bp, Homo sapiens
tgctctatatrttttgcacac

SEQ ID NO: 12034 - DNA, 21 bp, Homo sapiens
ttcattttctytcttggaccc

SEQ ID NO: 12035 - DNA, 21 bp, Homo sapiens
aaagggtttcrgggccaaagc

SEQ ID NO: 12036 - DNA, 21 bp, Homo sapiens
ccggtatccartagacaccct

SEQ ID NO: 12037 - DNA, 21 bp, Homo sapiens
tttggtaattratgtgggttc

SEQ ID NO: 12038 - DNA, 21 bp, Homo sapiens
agtgaggtgayccttcatagg

SEQ ID NO: 12039 - DNA, 21 bp, Homo sapiens
cccttttttaygtaaaagtaa

SEQ ID NO: 12040 - DNA, 21 bp, Homo sapiens
tatgatgtcaygctggccttc

SEQ ID NO: 12041 - DNA, 21 bp, Homo sapiens
cagttccagcrgcttttggag

SEQ ID NO: 12042 - DNA, 21 bp, Homo sapiens
cggctggaaaygggcatgcct

SEQ ID NO: 12043 - DNA, 21 bp, Homo sapiens
tacctaggcaygacctaacgc

SEQ ID NO: 12044 - DNA, 21 bp, Homo sapiens
gaagaagaggytgggagaggg

SEQ ID NO: 12045 - DNA, 21 bp, Homo sapiens
gaggaagaagyggggagatag

SEQ ID NO: 12046 - DNA, 21 bp, Homo sapiens
acatggttgcmggcagttaca

SEQ ID NO: 12047 - DNA, 21 bp, Homo sapiens
gaaacccttgmttggaggaat

SEQ ID NO: 12048 - DNA, 21 bp, Homo sapiens
tggctcaactrttggattata

SEQ ID NO: 12049 - DNA, 21 bp, Homo sapiens
gtcatttgttrtgaaagagcc

SEQ ID NO: 12050 - DNA, 21 bp, Homo sapiens
ctcaaagataytcttcatagt

SEQ ID NO: 12051 - DNA, 21 bp, Homo sapiens
caattccacayctctaaagaa

SEQ ID NO: 12052 - DNA, 21 bp, Homo sapiens
taggacaagcrtacttctctc

SEQ ID NO: 12053 - DNA, 21 bp, Homo sapiens
tctgaaggcartgagggatgg

SEQ ID NO: 12054 - DNA, 21 bp, Homo sapiens
tcccggtaccrcagtgctcgt

SEQ ID NO: 12055 - DNA, 21 bp, Homo sapiens
aatattttcarttaaaattat

SEQ ID NO: 12056 - DNA, 21 bp, Homo sapiens
tggaaacaacrccccagcttg

SEQ ID NO: 12057 - DNA, 21 bp, Homo sapiens
ctggatttgtytatggatgga

SEQ ID NO: 12058 - DNA, 21 bp, Homo sapiens
tttgggagttrtctgcatttg

SEQ ID NO: 12059 - DNA, 21 bp, Homo sapiens
gtttctgctcycaagaagctc

SEQ ID NO: 12060 - DNA, 21 bp, Homo sapiens
ctgatttcacraagttgttat

SEQ ID NO: 12061 - DNA, 21 bp, Homo sapiens
tggcccaggtragctgtccct

SEQ ID NO: 12062 - DNA, 21 bp, Homo sapiens
gtaagagcctyaagtgtgcct

SEQ ID NO: 12063 - DNA, 21 bp, Homo sapiens
ttttaaacctraagttggtct

SEQ ID NO: 12064 - DNA, 21 bp, Homo sapiens
atgccaagaargtatgatttg

SEQ ID NO: 12065 - DNA, 21 bp, Homo sapiens
agtgagaacaragaggatacc

SEQ ID NO: 12066 - DNA, 21 bp, Homo sapiens
ggctgaagagrtgtctgtgtt

SEQ ID NO: 12067 - DNA, 21 bp, Homo sapiens
aaaataaaagkgttaccaaaa

SEQ ID NO: 12068 - DNA, 21 bp, Homo sapiens
tgtctgtctargtacaggtct

SEQ ID NO: 12069 - DNA, 21 bp, Homo sapiens
ggcaatagatrgcactttgta

SEQ ID NO: 12070 - DNA, 21 bp, Homo sapiens
cctgtttttcyatcaaatatg

SEQ ID NO: 12071 - DNA, 21 bp, Homo sapiens
tactgtgatamtgctggaaaa

SEQ ID NO: 12072 - DNA, 21 bp, Homo sapiens
gttataacatkcatttcttta

SEQ ID NO: 12073 - DNA, 21 bp, Homo sapiens
gttactcaagraagagtttat

SEQ ID NO: 12074 - DNA, 21 bp, Homo sapiens
acgttcatctragcagtatct

SEQ ID NO: 12075 - DNA, 21 bp, Homo sapiens
ttttcacatayacatagtcca

SEQ ID NO: 12076 - DNA, 21 bp, Homo sapiens
gcaggagaaaygttgtcaaat

SEQ ID NO: 12077 - DNA, 21 bp, Homo sapiens
caacatgttaygcaaacacct

SEQ ID NO: 12078 - DNA, 21 bp, Homo sapiens
catggatcacrtgaggaggaa

SEQ ID NO: 12079 - DNA, 21 bp, Homo sapiens
tgcaggagtamattcagtaga

SEQ ID NO: 12080 - DNA, 21 bp, Homo sapiens
aggagacatayacctacaatt

SEQ ID NO: 12081 - DNA, 21 bp, Homo sapiens
actaagttcargagtatataa

SEQ ID NO: 12082 - DNA, 21 bp, Homo sapiens
aacttgaataygggctgtgga

SEQ ID NO: 12083 - DNA, 21 bp, Homo sapiens
taccccgatamgttcccttca

SEQ ID NO: 12084 - DNA, 21 bp, Homo sapiens
cagctctgagraagtcatctg

SEQ ID NO: 12085 - DNA, 21 bp, Homo sapiens
aacaacaacaraaaaagtgag

SEQ ID NO: 12086 - DNA, 21 bp, Homo sapiens
gagatcaggcmcttgtggccc

SEQ ID NO: 12087 - DNA, 21 bp, Homo sapiens
ggcagggaacrgaggctccct

SEQ ID NO: 12088 - DNA, 21 bp, Homo sapiens
tctagagcagygtagagctta

SEQ ID NO: 12089 - DNA, 21 bp, Homo sapiens
acttgatgacygatctgaaaa

SEQ ID NO: 12090 - DNA, 21 bp, Homo sapiens
aggatgttttytgaatgagtc

SEQ ID NO: 12091 - DNA, 21 bp, Homo sapiens
gtcctcagagycccctgtagg

SEQ ID NO: 12092 - DNA, 21 bp, Homo sapiens
attcagtagamacttattgct

SEQ ID NO: 12093 - DNA, 21 bp, Homo sapiens
tcacctggagyagatgtggcc

SEQ ID NO: 12094 - DNA, 21 bp, Homo sapiens
gctgaaggcarccagtcagtc

SEQ ID NO: 12095 - DNA, 21 bp, Homo sapiens
gaaagccaggygctgacccac

SEQ ID NO: 12096 - DNA, 21 bp, Homo sapiens
caagggtgcaygtgctggggg

SEQ ID NO: 12097 - DNA, 21 bp, Homo sapiens
tgttctaagcmggaagctgag

SEQ ID NO: 12098 - DNA, 21 bp, Homo sapiens
aaacaacgaayatttatctgc

SEQ ID NO: 12099 - DNA, 21 bp, Homo sapiens
tgctggctttycgtcatatgc

SEQ ID NO: 12100 - DNA, 21 bp, Homo sapiens
agtataaggtrgtcctgaggc

SEQ ID NO: 12101 - DNA, 21 bp, Homo sapiens
aaccaggacartttgaataga

SEQ ID NO: 12102 - DNA, 21 bp, Homo sapiens
taagagattgygttagatatt

SEQ ID NO: 12103 - DNA, 21 bp, Homo sapiens
ccttagatctktgattcctgg

SEQ ID NO: 12104 - DNA, 21 bp, Homo sapiens
ctggttcatcrtattggcatt

SEQ ID NO: 12105 - DNA, 21 bp, Homo sapiens
cgttgtggatygtattaattg

SEQ ID NO: 12106 - DNA, 21 bp, Homo sapiens
taagaatgtayacaacatatt

SEQ ID NO: 12107 - DNA, 21 bp, Homo sapiens
agaggctcctraggatgataa

SEQ ID NO: 12108 - DNA, 21 bp, Homo sapiens
gtcaaatgaaytttaacaaag

SEQ ID NO: 12109 - DNA, 21 bp, Homo sapiens
ctggaaattgyactacaagga

SEQ ID NO: 12110 - DNA, 21 bp, Homo sapiens
caagtaaataygtaagtaaat

SEQ ID NO: 12111 - DNA, 21 bp, Homo sapiens
actgccaacaraattatgttt

SEQ ID NO: 12112 - DNA, 21 bp, Homo sapiens
aatacaaggakttctttttaa

SEQ ID NO: 12113 - DNA, 21 bp, Homo sapiens
ttcatattatrtattaaaatg

SEQ ID NO: 12114 - DNA, 21 bp, Homo sapiens
aataaaatgtytgcgatagat

SEQ ID NO: 12115 - DNA, 21 bp, Homo sapiens
cagcagcattrtatgtatttt

SEQ ID NO: 12116 - DNA, 21 bp, Homo sapiens
tggctggggtyttctgatacc

SEQ ID NO: 12117 - DNA, 21 bp, Homo sapiens
gactctcaggrccaggcgcaa

SEQ ID NO: 12118 - DNA, 21 bp, Homo sapiens
aaagggcatgycaatgtatta

SEQ ID NO: 12119 - DNA, 21 bp, Homo sapiens
ggcagtagagytttgggccta

SEQ ID NO: 12120 - DNA, 21 bp, Homo sapiens
ttataagtacyctaacagtgc

SEQ ID NO: 12121 - DNA, 21 bp, Homo sapiens
tgctttgttcktctgaaaagc

SEQ ID NO: 12122 - DNA, 21 bp, Homo sapiens
aatgctgatgrcagctgcaaa

SEQ ID NO: 12123 - DNA, 21 bp, Homo sapiens
agatgcatagrccctctcaga

SEQ ID NO: 12124 - DNA, 21 bp, Homo sapiens
tcttcagctcrtgacatttat

SEQ ID NO: 12125 - DNA, 21 bp, Homo sapiens
acaaaagaggrctaattcaga

SEQ ID NO: 12126 - DNA, 21 bp, Homo sapiens
ccttttctcarctgggacagg

SEQ ID NO: 12127 - DNA, 21 bp, Homo sapiens
gacagactttytgggtaattt

SEQ ID NO: 12128 - DNA, 21 bp, Homo sapiens
ttagaataacrttttgttttt

SEQ ID NO: 12129 - DNA, 21 bp, Homo sapiens
cactgtcttcrtccagtacca

SEQ ID NO: 12130 - DNA, 21 bp, Homo sapiens
ccggctagagyaacccaagta

SEQ ID NO: 12131 - DNA, 21 bp, Homo sapiens
actttccctgragataagaac

SEQ ID NO: 12132 - DNA, 21 bp, Homo sapiens
attttttctaycttggagctt

SEQ ID NO: 12133 - DNA, 21 bp, Homo sapiens
agctatggctyatctgagaat

SEQ ID NO: 12134 - DNA, 21 bp, Homo sapiens
acatcacctcractcagtcat

SEQ ID NO: 12135 - DNA, 21 bp, Homo sapiens
ggccagaaagyctttagagtc

SEQ ID NO: 12136 - DNA, 21 bp, Homo sapiens
ctaatgaccayaggctgcaaa

SEQ ID NO: 12137 - DNA, 21 bp, Homo sapiens
tactcacgtcrtatacattcc

SEQ ID NO: 12138 - DNA, 21 bp, Homo sapiens
acatacatatrcacatactcc

SEQ ID NO: 12139 - DNA, 21 bp, Homo sapiens
ttccctctcartgataatgcc

SEQ ID NO: 12140 - DNA, 21 bp, Homo sapiens
gcagaatatamatttttctca

SEQ ID NO: 12141 - DNA, 21 bp, Homo sapiens
atgaagggacytccacactca

SEQ ID NO: 12142 - DNA, 21 bp, Homo sapiens
atgactttccrcatcacctga

SEQ ID NO: 12143 - DNA, 21 bp, Homo sapiens
atggttccaakactctccaac

SEQ ID NO: 12144 - DNA, 21 bp, Homo sapiens
gacattaatakgtttctaaca

SEQ ID NO: 12145 - DNA, 21 bp, Homo sapiens
cacggaaggcrttatctttgc

SEQ ID NO: 12146 - DNA, 21 bp, Homo sapiens
taatttagaaygtgtgtctat

SEQ ID NO: 12147 - DNA, 21 bp, Homo sapiens
gtctgtattgrtgtctaaaga

SEQ ID NO: 12148 - DNA, 21 bp, Homo sapiens
tctttaaagaytggccatctc

SEQ ID NO: 12149 - DNA, 21 bp, Homo sapiens
aaaatatgtayactttgatga

SEQ ID NO: 12150 - DNA, 21 bp, Homo sapiens
tggccactgtmatgtgaaagt

SEQ ID NO: 12151 - DNA, 21 bp, Homo sapiens
gaggacttccractttaaaat

SEQ ID NO: 12152 - DNA, 21 bp, Homo sapiens
tcctggaaagyggagattcct

SEQ ID NO: 12153 - DNA, 21 bp, Homo sapiens
tattactctgytttgaaggat

SEQ ID NO: 12154 - DNA, 21 bp, Homo sapiens
ctggtgttttyctgcttaaga

SEQ ID NO: 12155 - DNA, 21 bp, Homo sapiens
agataacaccragatgggtca

SEQ ID NO: 12156 - DNA, 21 bp, Homo sapiens
ctggtccacartggatttcac

SEQ ID NO: 12157 - DNA, 21 bp, Homo sapiens
gtttgaatacmtgccagacat

SEQ ID NO: 12158 - DNA, 21 bp, Homo sapiens
aggagcatagrtcaggtaaat

SEQ ID NO: 12159 - DNA, 21 bp, Homo sapiens
atactgctatrctaaagtttt

SEQ ID NO: 12160 - DNA, 21 bp, Homo sapiens
attgcattccyctaagacagt

SEQ ID NO: 12161 - DNA, 21 bp, Homo sapiens
tattgtgaagrcctcttatac

SEQ ID NO: 12162 - DNA, 21 bp, Homo sapiens
aagaagtgatrggcccttctt

SEQ ID NO: 12163 - DNA, 21 bp, Homo sapiens
ctccagcaggmtacaccaatc

SEQ ID NO: 12164 - DNA, 21 bp, Homo sapiens
ttttatgtccytaggctttct

SEQ ID NO: 12165 - DNA, 21 bp, Homo sapiens
cattgctcccyattttctatc

SEQ ID NO: 12166 - DNA, 21 bp, Homo sapiens
tgttaactacrggtcaaacat

SEQ ID NO: 12167 - DNA, 21 bp, Homo sapiens
tgctgcacagytttaagtctg

SEQ ID NO: 12168 - DNA, 21 bp, Homo sapiens
gtgtaaattarttcagctttt

SEQ ID NO: 12169 - DNA, 21 bp, Homo sapiens
actggctgatkgtggggctcg

SEQ ID NO: 12170 - DNA, 21 bp, Homo sapiens
gggtagaagakgtaggaaaga

SEQ ID NO: 12171 - DNA, 21 bp, Homo sapiens
acgggtttgaygtggttagat

SEQ ID NO: 12172 - DNA, 21 bp, Homo sapiens
actacataccrtatcatttca

SEQ ID NO: 12173 - DNA, 21 bp, Homo sapiens
aataaaatctyttacatgcac

SEQ ID NO: 12174 - DNA, 21 bp, Homo sapiens
atagaagctcrgtacgatatc

SEQ ID NO: 12175 - DNA, 21 bp, Homo sapiens
cctaggtcttrcgttgcccta

SEQ ID NO: 12176 - DNA, 21 bp, Homo sapiens
aatataggagyccactatccc

SEQ ID NO: 12177 - DNA, 21 bp, Homo sapiens
tagtagagaaygttgtatttg

SEQ ID NO: 12178 - DNA, 21 bp, Homo sapiens
aggcaagatgkgtaacatgtc

SEQ ID NO: 12179 - DNA, 21 bp, Homo sapiens
taaaccaattrcggagctgta

SEQ ID NO: 12180 - DNA, 21 bp, Homo sapiens
gggagatgaartgctatgtga

SEQ ID NO: 12181 - DNA, 21 bp, Homo sapiens
ccatgtctccytaaggtgcaa

SEQ ID NO: 12182 - DNA, 21 bp, Homo sapiens
gcttcttcagyggcccctccg

SEQ ID NO: 12183 - DNA, 21 bp, Homo sapiens
ttgccttgtcyggtaggctgt

SEQ ID NO: 12184 - DNA, 21 bp, Homo sapiens
gctgagagcaygtacagcaac

SEQ ID NO: 12185 - DNA, 21 bp, Homo sapiens
ctttcaaactmattttccagc

SEQ ID NO: 12186 - DNA, 21 bp, Homo sapiens
ttacaccaagraggtaggccc

SEQ ID NO: 12187 - DNA, 21 bp, Homo sapiens
aaggctgtttmttttaaagaa

SEQ ID NO: 12188 - DNA, 21 bp, Homo sapiens
acttttacacyatggaagggc

SEQ ID NO: 12189 - DNA, 21 bp, Homo sapiens
ctggtccaaayttacagacag

SEQ ID NO: 12190 - DNA, 21 bp, Homo sapiens
aaaaggctctyggctctcctt

SEQ ID NO: 12191 - DNA, 21 bp, Homo sapiens
gacattttgayaatgtgtctt

SEQ ID NO: 12192 - DNA, 21 bp, Homo sapiens
gggcagccacrcagggaaact

SEQ ID NO: 12193 - DNA, 21 bp, Homo sapiens
gaaagtagatkagtaatagcc

SEQ ID NO: 12194 - DNA, 21 bp, Homo sapiens
taaattacatrctatataatc

SEQ ID NO: 12195 - DNA, 21 bp, Homo sapiens
gacagggcagygaccaccatg

SEQ ID NO: 12196 - DNA, 21 bp, Homo sapiens
gtggtattctmtcaaaaatgt

SEQ ID NO: 12197 - DNA, 21 bp, Homo sapiens
tggccctcttkctgaaaatca

SEQ ID NO: 12198 - DNA, 21 bp, Homo sapiens
ctgtccttgartggaactcca

SEQ ID NO: 12199 - DNA, 21 bp, Homo sapiens
ttgacttcctrctgctgcaag

SEQ ID NO: 12200 - DNA, 21 bp, Homo sapiens
tgatcgtcccyggctttggct

SEQ ID NO: 12201 - DNA, 21 bp, Homo sapiens
ctttcttcgcyttttctctcc

SEQ ID NO: 12202 - DNA, 21 bp, Homo sapiens
atggcccttgyttccatcaga

SEQ ID NO: 12203 - DNA, 21 bp, Homo sapiens
aattccctatkttgaactaca

SEQ ID NO: 12204 - DNA, 21 bp, Homo sapiens
atttgctttcygtgggccact

SEQ ID NO: 12205 - DNA, 21 bp, Homo sapiens
ctgaaatcaaygtcagtgttg

SEQ ID NO: 12206 - DNA, 21 bp, Homo sapiens
ctttgtctcckggttagatcc

SEQ ID NO: 12207 - DNA, 21 bp, Homo sapiens
gtaaggccttyaaggatgatt

SEQ ID NO: 12208 - DNA, 21 bp, Homo sapiens
cctctttaaayggggactggg

SEQ ID NO: 12209 - DNA, 21 bp, Homo sapiens
cacagagtgcrtgtgatggac

SEQ ID NO: 12210 - DNA, 21 bp, Homo sapiens
ttgattgtctyacaacaagca

SEQ ID NO: 12211 - DNA, 21 bp, Homo sapiens
agatattacakttgttgtgac

SEQ ID NO: 12212 - DNA, 21 bp, Homo sapiens
cattgaatatytctctcaata

SEQ ID NO: 12213 - DNA, 21 bp, Homo sapiens
ttttgccatcrtagtgctttg

SEQ ID NO: 12214 - DNA, 21 bp, Homo sapiens
tgtaagcatgygtgccgtgta

SEQ ID NO: 12215 - DNA, 21 bp, Homo sapiens
tctcaggttgyttttttttct

SEQ ID NO: 12216 - DNA, 21 bp, Homo sapiens
gatgggggctrggtggaacgg

SEQ ID NO: 12217 - DNA, 21 bp, Homo sapiens
gcagttaatgmttttttctta

SEQ ID NO: 12218 - DNA, 21 bp, Homo sapiens
agtgcagtggygaggtaaagg

SEQ ID NO: 12219 - DNA, 21 bp, Homo sapiens
gggagtgtggrgatggagggg

SEQ ID NO: 12220 - DNA, 21 bp, Homo sapiens
aaggcttaaarggatggcttc

SEQ ID NO: 12221 - DNA, 21 bp, Homo sapiens
gcgttttattrgtaacaacaa

SEQ ID NO: 12222 - DNA, 21 bp, Homo sapiens
tttggggaggraggagtgaca

SEQ ID NO: 12223 - DNA, 21 bp, Homo sapiens
agtgatgagtygagagtggcc

SEQ ID NO: 12224 - DNA, 21 bp, Homo sapiens
gtttagggaayattgggggca

SEQ ID NO: 12225 - DNA, 21 bp, Homo sapiens
gcaatgacttytgcacaaaac

SEQ ID NO: 12226 - DNA, 21 bp, Homo sapiens
taattcaatartaagtcttag

SEQ ID NO: 12227 - DNA, 21 bp, Homo sapiens
gctccttattyatcaggcaga

SEQ ID NO: 12228 - DNA, 21 bp, Homo sapiens
aatcacttgamactttcactc

SEQ ID NO: 12229 - DNA, 21 bp, Homo sapiens
ataagggcctycaaggaactg

SEQ ID NO: 12230 - DNA, 21 bp, Homo sapiens
ccaataaatgrtctagccaca

SEQ ID NO: 12231 - DNA, 21 bp, Homo sapiens
tgctctggtgyagggtgcatc

SEQ ID NO: 12232 - DNA, 21 bp, Homo sapiens
aagatgtgagrcttggaatgt

SEQ ID NO: 12233 - DNA, 21 bp, Homo sapiens
tgctcaaggtygttctcctat

SEQ ID NO: 12234 - DNA, 21 bp, Homo sapiens
agattccagayttatggcctt

SEQ ID NO: 12235 - DNA, 21 bp, Homo sapiens
tcaaaaatgargagcaaagct

SEQ ID NO: 12236 - DNA, 21 bp, Homo sapiens
atttcttgggrattgaggata

SEQ ID NO: 12237 - DNA, 21 bp, Homo sapiens
tccaggaactragggaggacc

SEQ ID NO: 12238 - DNA, 21 bp, Homo sapiens
caatgaagatkgaatgagcac

SEQ ID NO: 12239 - DNA, 21 bp, Homo sapiens
aggataggtgyaactttataa

SEQ ID NO: 12240 - DNA, 21 bp, Homo sapiens
tccccccacarcagaacaatg

SEQ ID NO: 12241 - DNA, 21 bp, Homo sapiens
gcatataattyagtggtcttt

SEQ ID NO: 12242 - DNA, 21 bp, Homo sapiens
tagctgattcrttaatctatt

SEQ ID NO: 12243 - DNA, 21 bp, Homo sapiens
agactattatragagaagagc

SEQ ID NO: 12244 - DNA, 21 bp, Homo sapiens
cttaaaggaartggacaagag

SEQ ID NO: 12245 - DNA, 21 bp, Homo sapiens
ttcaggctttmaactatcttt

SEQ ID NO: 12246 - DNA, 21 bp, Homo sapiens
ctgcctcttayctgcctaggc

SEQ ID NO: 12247 - DNA, 21 bp, Homo sapiens
acaatactacrttacaggttg

SEQ ID NO: 12248 - DNA, 21 bp, Homo sapiens
aggaactacgraagtttttcc

SEQ ID NO: 12249 - DNA, 21 bp, Homo sapiens
ccaggctttgrggatcaggaa

SEQ ID NO: 12250 - DNA, 21 bp, Homo sapiens
aataggcaccrcctagaatga

SEQ ID NO: 12251 - DNA, 21 bp, Homo sapiens
gagtaatcagyataggtgatg

SEQ ID NO: 12252 - DNA, 21 bp, Homo sapiens
tcatcccatckgtcaaaagag

SEQ ID NO: 12253 - DNA, 21 bp, Homo sapiens
aaccatttgcmaatggaatag

SEQ ID NO: 12254 - DNA, 21 bp, Homo sapiens
aagcaatctcrccccttctgc

SEQ ID NO: 12255 - DNA, 21 bp, Homo sapiens
aacaactagaytaaatatggg

SEQ ID NO: 12256 - DNA, 21 bp, Homo sapiens
aaaggggaaamtagtgtgctt

SEQ ID NO: 12257 - DNA, 21 bp, Homo sapiens
aggattataaracaacaaaaa

SEQ ID NO: 12258 - DNA, 21 bp, Homo sapiens
aagggatgaayctgctagaga

SEQ ID NO: 12259 - DNA, 21 bp, Homo sapiens
tcttccatcayttctctcccg

SEQ ID NO: 12260 - DNA, 21 bp, Homo sapiens
gtgctttttargatcacaata

SEQ ID NO: 12261 - DNA, 21 bp, Homo sapiens
aatctgcatgraaatccaaac

SEQ ID NO: 12262 - DNA, 21 bp, Homo sapiens
acctgtagtcrcagttgtttg

SEQ ID NO: 12263 - DNA, 21 bp, Homo sapiens
tgtttgacaamcactcttagg

SEQ ID NO: 12264 - DNA, 21 bp, Homo sapiens
ttttctgtagrtgagaatacg

SEQ ID NO: 12265 - DNA, 21 bp, Homo sapiens
tagcctgttcrtcctctgcag

SEQ ID NO: 12266 - DNA, 21 bp, Homo sapiens
ctccagcagcmgggatatatt

SEQ ID NO: 12267 - DNA, 21 bp, Homo sapiens
aggcacaaaamagagaatcat

SEQ ID NO: 12268 - DNA, 21 bp, Homo sapiens
aatttctttaytgacaacttt

SEQ ID NO: 12269 - DNA, 21 bp, Homo sapiens
aactgctacamaatgaaaata

SEQ ID NO: 12270 - DNA, 21 bp, Homo sapiens
cagtgttaacraatcaacaat

SEQ ID NO: 12271 - DNA, 21 bp, Homo sapiens
gtactgactcygctttactgt

SEQ ID NO: 12272 - DNA, 21 bp, Homo sapiens
aagaaaaaacragaacagaca

SEQ ID NO: 12273 - DNA, 21 bp, Homo sapiens
gtgtcttagckgttagtcatc

SEQ ID NO: 12274 - DNA, 21 bp, Homo sapiens
aggttcctcamagtacctgat

SEQ ID NO: 12275 - DNA, 21 bp, Homo sapiens
cactaaagtarcagatgtgaa

SEQ ID NO: 12276 - DNA, 21 bp, Homo sapiens
taattttcagraaatttgtat

SEQ ID NO: 12277 - DNA, 21 bp, Homo sapiens
gaatcctttcrgttgctagca

SEQ ID NO: 12278 - DNA, 21 bp, Homo sapiens
atgaaggagcraaggagaaaa

SEQ ID NO: 12279 - DNA, 21 bp, Homo sapiens
aggaaagcgartaagacttaa

SEQ ID NO: 12280 - DNA, 21 bp, Homo sapiens
tgcttttggtracaccaagct

SEQ ID NO: 12281 - DNA, 21 bp, Homo sapiens
ctaggcgaaamgtcctggacc

SEQ ID NO: 12282 - DNA, 21 bp, Homo sapiens
taaaatggaayaaaatgttaa

SEQ ID NO: 12283 - DNA, 21 bp, Homo sapiens
agatggttctkctcagtccac

SEQ ID NO: 12284 - DNA, 21 bp, Homo sapiens
gtggaatatayatgtgtccga

SEQ ID NO: 12285 - DNA, 21 bp, Homo sapiens
tatcctgcccygtttcctgct

SEQ ID NO: 12286 - DNA, 21 bp, Homo sapiens
tctagcagagrctggagttat

SEQ ID NO: 12287 - DNA, 21 bp, Homo sapiens
ttttttgtttmctggaaacag

SEQ ID NO: 12288 - DNA, 21 bp, Homo sapiens
tgcctctgttycctccatgtt

SEQ ID NO: 12289 - DNA, 21 bp, Homo sapiens
gtttacaaatrtaaggtatga

SEQ ID NO: 12290 - DNA, 21 bp, Homo sapiens
tgggtgtcttrtgcttatatc

SEQ ID NO: 12291 - DNA, 21 bp, Homo sapiens
tgacagtcttycgttaaagat

SEQ ID NO: 12292 - DNA, 21 bp, Homo sapiens
ggtggaaacaygttatagtcc

SEQ ID NO: 12293 - DNA, 21 bp, Homo sapiens
gtagccaagayatcgaacctc

SEQ ID NO: 12294 - DNA, 21 bp, Homo sapiens
agattctccartcctatcggc

SEQ ID NO: 12295 - DNA, 21 bp, Homo sapiens
tgaggactgcygtaaggcttt

SEQ ID NO: 12296 - DNA, 21 bp, Homo sapiens
catatttcctyatttttcttg

SEQ ID NO: 12297 - DNA, 21 bp, Homo sapiens
atgaaggtacyatggcttgtt

SEQ ID NO: 12298 - DNA, 21 bp, Homo sapiens
ggtgcagaatktgcttaaaat

SEQ ID NO: 12299 - DNA, 21 bp, Homo sapiens
aatttttttarccaatacatc

SEQ ID NO: 12300 - DNA, 21 bp, Homo sapiens
tattcaacttrtttgacttta

SEQ ID NO: 12301 - DNA, 21 bp, Homo sapiens
tgcaccagctrcatcccattt

SEQ ID NO: 12302 - DNA, 21 bp, Homo sapiens
tgaggctccamacagatctat

SEQ ID NO: 12303 - DNA, 21 bp, Homo sapiens
ccagtgatggktttctctgtg

SEQ ID NO: 12304 - DNA, 21 bp, Homo sapiens
agttctgttaycttcaccact

SEQ ID NO: 12305 - DNA, 21 bp, Homo sapiens
ttctctcctcrtcttctgtta

SEQ ID NO: 12306 - DNA, 21 bp, Homo sapiens
cagaattacargacggcaatg

SEQ ID NO: 12307 - DNA, 21 bp, Homo sapiens
ttgataattgyttttacattg

SEQ ID NO: 12308 - DNA, 21 bp, Homo sapiens
ttacacacccrgctcaactcc

SEQ ID NO: 12309 - DNA, 21 bp, Homo sapiens
gacagctgccrgaccagtttg

SEQ ID NO: 12310 - DNA, 21 bp, Homo sapiens
ccattgctgamctattttttc

SEQ ID NO: 12311 - DNA, 21 bp, Homo sapiens
gagattagttygtccttcatt

SEQ ID NO: 12312 - DNA, 21 bp, Homo sapiens
actccaatgcyctagtctgat

SEQ ID NO: 12313 - DNA, 21 bp, Homo sapiens
atggaaagaamctaatactcc

SEQ ID NO: 12314 - DNA, 21 bp, Homo sapiens
tctttttttcyatggtgacat

SEQ ID NO: 12315 - DNA, 21 bp, Homo sapiens
ttccagggtcrctctaatgta

SEQ ID NO: 12316 - DNA, 21 bp, Homo sapiens
tcgcaatttcygatatggaaa

SEQ ID NO: 12317 - DNA, 21 bp, Homo sapiens
ccaactaagayagcatataac

SEQ ID NO: 12318 - DNA, 21 bp, Homo sapiens
atttttccccrtgattcttcg

SEQ ID NO: 12319 - DNA, 21 bp, Homo sapiens
aattacatackcctttatgat

SEQ ID NO: 12320 - DNA, 21 bp, Homo sapiens
agcaggtttarcaatgctctt

SEQ ID NO: 12321 - DNA, 21 bp, Homo sapiens
tgttgttcaayggtcaactgt

SEQ ID NO: 12322 - DNA, 21 bp, Homo sapiens
attgtataaakaacaggctgg

SEQ ID NO: 12323 - DNA, 21 bp, Homo sapiens
accaccagacrtaggtagttg

SEQ ID NO: 12324 - DNA, 21 bp, Homo sapiens
ctggtctgttyagggattcga

SEQ ID NO: 12325 - DNA, 21 bp, Homo sapiens
attgtgaagayatttgtgacc

SEQ ID NO: 12326 - DNA, 21 bp, Homo sapiens
tgcatttctcygcacgtctct

SEQ ID NO: 12327 - DNA, 21 bp, Homo sapiens
agagttagacktagttgtaga

SEQ ID NO: 12328 - DNA, 21 bp, Homo sapiens
ggaaaagctcrctctgaagag

SEQ ID NO: 12329 - DNA, 21 bp, Homo sapiens
ccatctttttrccacactgtg

SEQ ID NO: 12330 - DNA, 21 bp, Homo sapiens
attcgtttctygagatggctt

SEQ ID NO: 12331 - DNA, 21 bp, Homo sapiens
cttgttttcaycaccagggac

SEQ ID NO: 12332 - DNA, 21 bp, Homo sapiens
aagttccctgytgtttatacg

SEQ ID NO: 12333 - DNA, 21 bp, Homo sapiens
atagcacctcrttaagaaaac

SEQ ID NO: 12334 - DNA, 21 bp, Homo sapiens
tatgatgcctrgcaaaataag

SEQ ID NO: 12335 - DNA, 21 bp, Homo sapiens
gcaaataaatrccaaaaaaag

SEQ ID NO: 12336 - DNA, 21 bp, Homo sapiens
ctttcagaagrtaattgtttg

SEQ ID NO: 12337 - DNA, 21 bp, Homo sapiens
ctgttgacttrtattaagctt

SEQ ID NO: 12338 - DNA, 21 bp, Homo sapiens
ttaagcttggygacattctga

SEQ ID NO: 12339 - DNA, 21 bp, Homo sapiens
tgatttggcaytggaaagttg

SEQ ID NO: 12340 - DNA, 21 bp, Homo sapiens
tcagcttttgrgccacagcag

SEQ ID NO: 12341 - DNA, 21 bp, Homo sapiens
gcactaccaaractagaaatc

SEQ ID NO: 12342 - DNA, 21 bp, Homo sapiens
aatgcagttamcataacatat

SEQ ID NO: 12343 - DNA, 21 bp, Homo sapiens
tgtagctgttycctgctaaag

SEQ ID NO: 12344 - DNA, 21 bp, Homo sapiens
aatagtatgaygtgctcttct

SEQ ID NO: 12345 - DNA, 21 bp, Homo sapiens
attagggataygtgattaatc

SEQ ID NO: 12346 - DNA, 21 bp, Homo sapiens
agacaaatggyaaacaactgc

SEQ ID NO: 12347 - DNA, 21 bp, Homo sapiens
aggaaaagtayggcacaagag

SEQ ID NO: 12348 - DNA, 21 bp, Homo sapiens
cttatttctcyatcatagata

SEQ ID NO: 12349 - DNA, 21 bp, Homo sapiens
tgttaaatacrtttttatctt

SEQ ID NO: 12350 - DNA, 21 bp, Homo sapiens
gtttgctcaamacttgtgcat

SEQ ID NO: 12351 - DNA, 21 bp, Homo sapiens
ttgagcaagarcattgtaatg

SEQ ID NO: 12352 - DNA, 21 bp, Homo sapiens
gagatttattktcttagtggt

SEQ ID NO: 12353 - DNA, 21 bp, Homo sapiens
tcacctcagarctaggcatac

SEQ ID NO: 12354 - DNA, 21 bp, Homo sapiens
catgaggtcarataattaaaa

SEQ ID NO: 12355 - DNA, 21 bp, Homo sapiens
ttattttgacrtcatgaaccc

SEQ ID NO: 12356 - DNA, 21 bp, Homo sapiens
ttccaatagtrgtaagaaagg

SEQ ID NO: 12357 - DNA, 21 bp, Homo sapiens
atctctaaatkcaggtaaata

SEQ ID NO: 12358 - DNA, 21 bp, Homo sapiens
ggcaccatgtyttttctacct

SEQ ID NO: 12359 - DNA, 21 bp, Homo sapiens
taagagatggrttttaaaaat

SEQ ID NO: 12360 - DNA, 21 bp, Homo sapiens
actttatagtrgggttaaatg

SEQ ID NO: 12361 - DNA, 21 bp, Homo sapiens
cttttggtacyccacttataa

SEQ ID NO: 12362 - DNA, 21 bp, Homo sapiens
gcccactctcrtggtaaagaa

SEQ ID NO: 12363 - DNA, 21 bp, Homo sapiens
gaagtcatatkttggggctct

SEQ ID NO: 12364 - DNA, 21 bp, Homo sapiens
agagggaaccmaggaacaaat

SEQ ID NO: 12365 - DNA, 21 bp, Homo sapiens
tcttgagctcyctgaactgta

SEQ ID NO: 12366 - DNA, 21 bp, Homo sapiens
aattcttcctragcagatctg

SEQ ID NO: 12367 - DNA, 21 bp, Homo sapiens
cttctcaatgyttgtggctcc

SEQ ID NO: 12368 - DNA, 21 bp, Homo sapiens
tggttttcttyataaagagaa

SEQ ID NO: 12369 - DNA, 21 bp, Homo sapiens
aggcagcataygagtgaagtg

SEQ ID NO: 12370 - DNA, 21 bp, Homo sapiens
tttctcctgcytctctccaac

SEQ ID NO: 12371 - DNA, 21 bp, Homo sapiens
atattttccayagacttcagc

SEQ ID NO: 12372 - DNA, 21 bp, Homo sapiens
taaactttctrtatccaagat

SEQ ID NO: 12373 - DNA, 21 bp, Homo sapiens
tccagtagaamgcatgcaggt

SEQ ID NO: 12374 - DNA, 21 bp, Homo sapiens
gttttgtctgyaataggcctt

SEQ ID NO: 12375 - DNA, 21 bp, Homo sapiens
agaaaaatacygggtccttac

SEQ ID NO: 12376 - DNA, 21 bp, Homo sapiens
gaatatgtgayaggatcctga

SEQ ID NO: 12377 - DNA, 21 bp, Homo sapiens
ttcattatggygcatgtgaag

SEQ ID NO: 12378 - DNA, 21 bp, Homo sapiens
atctacattaygcaaaagtat

SEQ ID NO: 12379 - DNA, 21 bp, Homo sapiens
ctagacttaartcctgatttt

SEQ ID NO: 12380 - DNA, 21 bp, Homo sapiens
gtttgttgagyaatgtttgtt

SEQ ID NO: 12381 - DNA, 21 bp, Homo sapiens
taggatggaarggatgttcta

SEQ ID NO: 12382 - DNA, 21 bp, Homo sapiens
gagttaccacrtgacctggca

SEQ ID NO: 12383 - DNA, 21 bp, Homo sapiens
attaataaacrcggtttcaaa

SEQ ID NO: 12384 - DNA, 21 bp, Homo sapiens
agccattatgkctgaagtaag

SEQ ID NO: 12385 - DNA, 21 bp, Homo sapiens
acaagtagcarttcagagctg

SEQ ID NO: 12386 - DNA, 21 bp, Homo sapiens
cttattaattyttgtgcccca

SEQ ID NO: 12387 - DNA, 21 bp, Homo sapiens
tcagagaatgygtttatgaag

SEQ ID NO: 12388 - DNA, 21 bp, Homo sapiens
tttacacttgygctaagagca

SEQ ID NO: 12389 - DNA, 21 bp, Homo sapiens
cctttactatrgttgtagatt

SEQ ID NO: 12390 - DNA, 21 bp, Homo sapiens
accttaggatyttcccctttt

SEQ ID NO: 12391 - DNA, 21 bp, Homo sapiens
tggctcctgtmttctgcctca

SEQ ID NO: 12392 - DNA, 21 bp, Homo sapiens
tttaccatctragccttatcc

SEQ ID NO: 12393 - DNA, 21 bp, Homo sapiens
taaaagttgtrtagacgaatg

SEQ ID NO: 12394 - DNA, 21 bp, Homo sapiens
gatagtgcctkaagactatct

SEQ ID NO: 12395 - DNA, 21 bp, Homo sapiens
ttctctctggyccactcctgg

SEQ ID NO: 12396 - DNA, 21 bp, Homo sapiens
tcatgtatgakttttttgtca

SEQ ID NO: 12397 - DNA, 21 bp, Homo sapiens
ttgttggtctrtaggttatca

SEQ ID NO: 12398 - DNA, 21 bp, Homo sapiens
aaaccacaaakatctctgctc

SEQ ID NO: 12399 - DNA, 21 bp, Homo sapiens
gcagcaaaggrtgctaggagg

SEQ ID NO: 12400 - DNA, 21 bp, Homo sapiens
aaaaaaaggcrcagtggtgat

SEQ ID NO: 12401 - DNA, 21 bp, Homo sapiens
cagatagtccyttctctcacc

SEQ ID NO: 12402 - DNA, 21 bp, Homo sapiens
agaaaatttgrcaataaagtg

SEQ ID NO: 12403 - DNA, 21 bp, Homo sapiens
aagatttatargtcagagatt

SEQ ID NO: 12404 - DNA, 21 bp, Homo sapiens
ttgtagtcagrcacttctgct

SEQ ID NO: 12405 - DNA, 21 bp, Homo sapiens
attcctccagygtccttctcc

SEQ ID NO: 12406 - DNA, 21 bp, Homo sapiens
ccagtggacgyttatttctcc

SEQ ID NO: 12407 - DNA, 21 bp, Homo sapiens
ttttaaagtgmtactaaattc

SEQ ID NO: 12408 - DNA, 21 bp, Homo sapiens
acttttccatytgtgggtaga

SEQ ID NO: 12409 - DNA, 21 bp, Homo sapiens
aaggccattaytgactagcgg

SEQ ID NO: 12410 - DNA, 21 bp, Homo sapiens
agaaatatctrtttaggtcat

SEQ ID NO: 12411 - DNA, 21 bp, Homo sapiens
taagcaaacargcaaagagaa

SEQ ID NO: 12412 - DNA, 21 bp, Homo sapiens
tattgctctgyctgtaactcg

SEQ ID NO: 12413 - DNA, 21 bp, Homo sapiens
ttaaaatatcycattagtgct

SEQ ID NO: 12414 - DNA, 21 bp, Homo sapiens
aaggtgtagayatacctgatt

SEQ ID NO: 12415 - DNA, 21 bp, Homo sapiens
atgacaatgayggtccacata

SEQ ID NO: 12416 - DNA, 21 bp, Homo sapiens
tactgagaggyggacagtgtc

SEQ ID NO: 12417 - DNA, 21 bp, Homo sapiens
taaccttatcyctgtccccaa

SEQ ID NO: 12418 - DNA, 21 bp, Homo sapiens
tttatgccacrggtagtatca

SEQ ID NO: 12419 - DNA, 21 bp, Homo sapiens
gttttcttgaygtgtgcagtt

SEQ ID NO: 12420 - DNA, 21 bp, Homo sapiens
aatctccctgrctatgactgc

SEQ ID NO: 12421 - DNA, 21 bp, Homo sapiens
tgcctgaaaarataaaatgaa

SEQ ID NO: 12422 - DNA, 21 bp, Homo sapiens
gtgaaaatcartgtggcacag

SEQ ID NO: 12423 - DNA, 21 bp, Homo sapiens
tgagagggtaygcagaagttg

SEQ ID NO: 12424 - DNA, 21 bp, Homo sapiens
ggcctggaaaygagcttactt

SEQ ID NO: 12425 - DNA, 21 bp, Homo sapiens
ttatcatagcrcacaccgtgt

SEQ ID NO: 12426 - DNA, 21 bp, Homo sapiens
acctataagtrggagctaaag

SEQ ID NO: 12427 - DNA, 21 bp, Homo sapiens
tctttctccaytggcatctgc

SEQ ID NO: 12428 - DNA, 21 bp, Homo sapiens
agctcctccaygagccagtgg

SEQ ID NO: 12429 - DNA, 21 bp, Homo sapiens
tttagggacgraaaggaaact

SEQ ID NO: 12430 - DNA, 21 bp, Homo sapiens
tcccctaaccrcgacagcatg

SEQ ID NO: 12431 - DNA, 21 bp, Homo sapiens
ttggctgcttyggggatgtgg

SEQ ID NO: 12432 - DNA, 21 bp, Homo sapiens
cttttaaattktgagtacaat

SEQ ID NO: 12433 - DNA, 21 bp, Homo sapiens
tggaatgtgcrccataaaaaa

SEQ ID NO: 12434 - DNA, 21 bp, Homo sapiens
gtaccctccaygtttttgtca

SEQ ID NO: 12435 - DNA, 21 bp, Homo sapiens
ctatctgctgktcagcccacc

SEQ ID NO: 12436 - DNA, 21 bp, Homo sapiens
tggataaaatrcacactaata

SEQ ID NO: 12437 - DNA, 21 bp, Homo sapiens
gagaccatctrtatatataca

SEQ ID NO: 12438 - DNA, 21 bp, Homo sapiens
attccagcgayggtttctgcc

SEQ ID NO: 12439 - DNA, 21 bp, Homo sapiens
tgtgtatgacrtgtcagtcaa

SEQ ID NO: 12440 - DNA, 21 bp, Homo sapiens
cacagaatagytacattgtca

SEQ ID NO: 12441 - DNA, 21 bp, Homo sapiens
tatcataaatktttgtagttc

SEQ ID NO: 12442 - DNA, 21 bp, Homo sapiens
tgagtgtttgyaaatttcacc

SEQ ID NO: 12443 - DNA, 21 bp, Homo sapiens
cctgagccaartaactccttt

SEQ ID NO: 12444 - DNA, 21 bp, Homo sapiens
ttctgttctcyttccttcttg

SEQ ID NO: 12445 - DNA, 21 bp, Homo sapiens
tttcaacaatmgagtttccag

SEQ ID NO: 12446 - DNA, 21 bp, Homo sapiens
ggcatttctayatcactttta

SEQ ID NO: 12447 - DNA, 21 bp, Homo sapiens
agtcaccaaartaaggaaaat

SEQ ID NO: 12448 - DNA, 21 bp, Homo sapiens
agtagccgccrcatgtaagac

SEQ ID NO: 12449 - DNA, 21 bp, Homo sapiens
actcagagtcraggccatttg

SEQ ID NO: 12450 - DNA, 21 bp, Homo sapiens
aatattaaaayagggtggaaa

SEQ ID NO: 12451 - DNA, 21 bp, Homo sapiens
gtttggcattrcagtaaaaaa

SEQ ID NO: 12452 - DNA, 21 bp, Homo sapiens
tatggtgagcrtccctctgtc

SEQ ID NO: 12453 - DNA, 21 bp, Homo sapiens
agatggcctgygggatacctc

SEQ ID NO: 12454 - DNA, 21 bp, Homo sapiens
agaacccattrgcatggtgct

SEQ ID NO: 12455 - DNA, 21 bp, Homo sapiens
atggcgatgaygcccatgagg

SEQ ID NO: 12456 - DNA, 21 bp, Homo sapiens
taaagatctcraggcagaatg

SEQ ID NO: 12457 - DNA, 21 bp, Homo sapiens
ctagctgtgaygtgtgtggca

SEQ ID NO: 12458 - DNA, 21 bp, Homo sapiens
accaggtaatrgttgatgatt

SEQ ID NO: 12459 - DNA, 21 bp, Homo sapiens
ctccctgtccrtgtctgtaaa

SEQ ID NO: 12460 - DNA, 21 bp, Homo sapiens
ttgcttggtgrttttctaaag

SEQ ID NO: 12461 - DNA, 21 bp, Homo sapiens
aaatacaaaargaggagagaa

SEQ ID NO: 12462 - DNA, 21 bp, Homo sapiens
ttgtactgtcrttgagatgtg

SEQ ID NO: 12463 - DNA, 21 bp, Homo sapiens
tccctttcacraattgcaaaa

SEQ ID NO: 12464 - DNA, 21 bp, Homo sapiens
gtaatacctcrttacactagt

SEQ ID NO: 12465 - DNA, 21 bp, Homo sapiens
tttttagttarcgaatttgtg

SEQ ID NO: 12466 - DNA, 21 bp, Homo sapiens
ctatacgtttyttaccatgta

SEQ ID NO: 12467 - DNA, 21 bp, Homo sapiens
tgttggctackgtggctccta

SEQ ID NO: 12468 - DNA, 21 bp, Homo sapiens
aaatcaagacrcccataagtc

SEQ ID NO: 12469 - DNA, 21 bp, Homo sapiens
tgaaaaggtckgtacatttaa

SEQ ID NO: 12470 - DNA, 21 bp, Homo sapiens
attcttttggkgtggtttgca

SEQ ID NO: 12471 - DNA, 21 bp, Homo sapiens
gagtggaggtrtcagtagatt

SEQ ID NO: 12472 - DNA, 21 bp, Homo sapiens
atctttctatytgttaaccaa

SEQ ID NO: 12473 - DNA, 21 bp, Homo sapiens
ttgtctttaartttttgttgg

SEQ ID NO: 12474 - DNA, 21 bp, Homo sapiens
cattttgatcrcccttaaaac

SEQ ID NO: 12475 - DNA, 21 bp, Homo sapiens
aaaacaattcyggcatagagg

SEQ ID NO: 12476 - DNA, 21 bp, Homo sapiens
catgagcaacrcaacagtttt

SEQ ID NO: 12477 - DNA, 21 bp, Homo sapiens
cttattcagtyagaaaaacat

SEQ ID NO: 12478 - DNA, 21 bp, Homo sapiens
ttgtgtctgtrtaaaagcgac

SEQ ID NO: 12479 - DNA, 21 bp, Homo sapiens
cagagtttaamtttgtctgag

SEQ ID NO: 12480 - DNA, 21 bp, Homo sapiens
aattggaatcrctgagcaata

SEQ ID NO: 12481 - DNA, 21 bp, Homo sapiens
atttttaattytcaagttctg

SEQ ID NO: 12482 - DNA, 21 bp, Homo sapiens
ctttttcccgkggggaagaga

SEQ ID NO: 12483 - DNA, 21 bp, Homo sapiens
aataacttcartaatatatat

SEQ ID NO: 12484 - DNA, 21 bp, Homo sapiens
tacatcactgkgggacttctt

SEQ ID NO: 12485 - DNA, 21 bp, Homo sapiens
ctcagccaccrttttacctgg

SEQ ID NO: 12486 - DNA, 21 bp, Homo sapiens
gaagacaacartgaaaaatat

SEQ ID NO: 12487 - DNA, 21 bp, Homo sapiens
agcgacctgcmcaaactctcc

SEQ ID NO: 12488 - DNA, 21 bp, Homo sapiens
ctacctgccckttgacatgct

SEQ ID NO: 12489 - DNA, 21 bp, Homo sapiens
tttcttaaagkgtttggcaca

SEQ ID NO: 12490 - DNA, 21 bp, Homo sapiens
ctgatacataygtgccggatt

SEQ ID NO: 12491 - DNA, 21 bp, Homo sapiens
atatcttcacrataaatgtct

SEQ ID NO: 12492 - DNA, 21 bp, Homo sapiens
tctagttaggractcaagggc

SEQ ID NO: 12493 - DNA, 21 bp, Homo sapiens
attttcatcayccattatatt

SEQ ID NO: 12494 - DNA, 21 bp, Homo sapiens
attctttttaygtgctcacta

SEQ ID NO: 12495 - DNA, 21 bp, Homo sapiens
gtataaccctrgacctctcta

SEQ ID NO: 12496 - DNA, 21 bp, Homo sapiens
ttatgaccccygcaggagtaa

SEQ ID NO: 12497 - DNA, 21 bp, Homo sapiens
agaagacctgkgtggaaagcg

SEQ ID NO: 12498 - DNA, 21 bp, Homo sapiens
ctgaaaagaartgatgacttg

SEQ ID NO: 12499 - DNA, 21 bp, Homo sapiens
ggtaaaataayatcttgcacc

SEQ ID NO: 12500 - DNA, 21 bp, Homo sapiens
gaaaaaaacaytggggaacga

SEQ ID NO: 12501 - DNA, 21 bp, Homo sapiens
tagctgtaaartgatatcaca

SEQ ID NO: 12502 - DNA, 21 bp, Homo sapiens
acacctggtayctgtgaaaat

SEQ ID NO: 12503 - DNA, 21 bp, Homo sapiens
agactgatctycatatgaaaa

SEQ ID NO: 12504 - DNA, 21 bp, Homo sapiens
cagaaatgagraagacttcta

SEQ ID NO: 12505 - DNA, 21 bp, Homo sapiens
ttgatgttctytattaatgtt

SEQ ID NO: 12506 - DNA, 21 bp, Homo sapiens
agctgtgcctkaaatactcaa

SEQ ID NO: 12507 - DNA, 21 bp, Homo sapiens
aaatggaggtrtatttgtcat

SEQ ID NO: 12508 - DNA, 21 bp, Homo sapiens
ttttctttccytcatgtagat

SEQ ID NO: 12509 - DNA, 21 bp, Homo sapiens
tttcacccacygaagaaaaaa

SEQ ID NO: 12510 - DNA, 21 bp, Homo sapiens
gaaaaccaagrgcctaattag

SEQ ID NO: 12511 - DNA, 21 bp, Homo sapiens
tctatgacttrgaaattcctt

SEQ ID NO: 12512 - DNA, 21 bp, Homo sapiens
tttagcctgcrtcagacttat

SEQ ID NO: 12513 - DNA, 21 bp, Homo sapiens
ctgccttccargataattgct

SEQ ID NO: 12514 - DNA, 21 bp, Homo sapiens
agaacagttgktcaccatttt

SEQ ID NO: 12515 - DNA, 21 bp, Homo sapiens
agatatatccygggtgagaat

SEQ ID NO: 12516 - DNA, 21 bp, Homo sapiens
attccacatcygcattggggt

SEQ ID NO: 12517 - DNA, 21 bp, Homo sapiens
tatctcggctractgataaaa

SEQ ID NO: 12518 - DNA, 21 bp, Homo sapiens
tccctggagaygaactgcttg

SEQ ID NO: 12519 - DNA, 21 bp, Homo sapiens
ctaggggaagkcaagaccagt

SEQ ID NO: 12520 - DNA, 21 bp, Homo sapiens
gagcactaacrtagcacaaaa

SEQ ID NO: 12521 - DNA, 21 bp, Homo sapiens
gcctttggggyttattactac

SEQ ID NO: 12522 - DNA, 21 bp, Homo sapiens
ctgaattctaygaaacctata

SEQ ID NO: 12523 - DNA, 21 bp, Homo sapiens
aagaataaatrtaaggggtga

SEQ ID NO: 12524 - DNA, 21 bp, Homo sapiens
tgtaatgaggyccatgaacgt

SEQ ID NO: 12525 - DNA, 21 bp, Homo sapiens
aggatttactrtttattactt

SEQ ID NO: 12526 - DNA, 21 bp, Homo sapiens
taaaaagggamatcacaatag

SEQ ID NO: 12527 - DNA, 21 bp, Homo sapiens
atagatgataytcttgaagca

SEQ ID NO: 12528 - DNA, 21 bp, Homo sapiens
cattttctatrttaaggtact

SEQ ID NO: 12529 - DNA, 21 bp, Homo sapiens
aagttatttcrttgcctcttt

SEQ ID NO: 12530 - DNA, 21 bp, Homo sapiens
cattggtttcyaataggtcct

SEQ ID NO: 12531 - DNA, 21 bp, Homo sapiens
gcttaagaccrtattcctccg

SEQ ID NO: 12532 - DNA, 21 bp, Homo sapiens
ctacaacaatyacaataaaca

SEQ ID NO: 12533 - DNA, 21 bp, Homo sapiens
gattacccatrattttatgca

SEQ ID NO: 12534 - DNA, 21 bp, Homo sapiens
agactatgttrtttatcaagc

SEQ ID NO: 12535 - DNA, 21 bp, Homo sapiens
cctgatataayataaaaatgc

SEQ ID NO: 12536 - DNA, 21 bp, Homo sapiens
gtggattgagrgacacatttt

SEQ ID NO: 12537 - DNA, 21 bp, Homo sapiens
aaccatgtggycatatgccag

SEQ ID NO: 12538 - DNA, 21 bp, Homo sapiens
agtgaggaaarcaatgttgta

SEQ ID NO: 12539 - DNA, 21 bp, Homo sapiens
gaagacaaccrtaaattgtca

SEQ ID NO: 12540 - DNA, 21 bp, Homo sapiens
catccccatcratcttaacaa

SEQ ID NO: 12541 - DNA, 21 bp, Homo sapiens
tgttctatttyttcatctggg

SEQ ID NO: 12542 - DNA, 21 bp, Homo sapiens
aaaagtcattyttcatatacc

SEQ ID NO: 12543 - DNA, 21 bp, Homo sapiens
gttagcaagarggaagtttaa

SEQ ID NO: 12544 - DNA, 21 bp, Homo sapiens
acagacctcaygttccatgaa

SEQ ID NO: 12545 - DNA, 21 bp, Homo sapiens
tttaggaaaaytgaactttct

SEQ ID NO: 12546 - DNA, 21 bp, Homo sapiens
acaccatctayaaagggaatg

SEQ ID NO: 12547 - DNA, 21 bp, Homo sapiens
ctagtaacaaygtgcaatata

SEQ ID NO: 12548 - DNA, 21 bp, Homo sapiens
ctagcttggtmttgtgcacag

SEQ ID NO: 12549 - DNA, 21 bp, Homo sapiens
ccttttgcacyttctcagtat

SEQ ID NO: 12550 - DNA, 21 bp, Homo sapiens
ctgaggtactrgtggttaggg

SEQ ID NO: 12551 - DNA, 21 bp, Homo sapiens
ttagtaaatayttggagactg

SEQ ID NO: 12552 - DNA, 21 bp, Homo sapiens
cagctgggcartaacaaatgc

SEQ ID NO: 12553 - DNA, 21 bp, Homo sapiens
caaataaaaayaagaataggg

SEQ ID NO: 12554 - DNA, 21 bp, Homo sapiens
tcaaatactaytccatctgcc

SEQ ID NO: 12555 - DNA, 21 bp, Homo sapiens
tgctttttctrctctaccgtg

SEQ ID NO: 12556 - DNA, 21 bp, Homo sapiens
acctcaataaycctatgaaag

SEQ ID NO: 12557 - DNA, 21 bp, Homo sapiens
ttggggatcayccagatcagt

SEQ ID NO: 12558 - DNA, 21 bp, Homo sapiens
tttgagtttcrgaataagagg

SEQ ID NO: 12559 - DNA, 21 bp, Homo sapiens
gtgtcctaggrtgcattttat

SEQ ID NO: 12560 - DNA, 21 bp, Homo sapiens
ccgatgatggrtctgaaaaat

SEQ ID NO: 12561 - DNA, 21 bp, Homo sapiens
taaaaaaaaayccactctgtt

SEQ ID NO: 12562 - DNA, 21 bp, Homo sapiens
taaaacctttkatttttttat

SEQ ID NO: 12563 - DNA, 21 bp, Homo sapiens
tgttttgcttktggtgtttct

SEQ ID NO: 12564 - DNA, 21 bp, Homo sapiens
ctctctaagcrccctctccat

SEQ ID NO: 12565 - DNA, 21 bp, Homo sapiens
gaatatagacrtttggattta

SEQ ID NO: 12566 - DNA, 21 bp, Homo sapiens
gctagaaatargagtaaaata

SEQ ID NO: 12567 - DNA, 21 bp, Homo sapiens
tggtaccactytactgtatta

SEQ ID NO: 12568 - DNA, 21 bp, Homo sapiens
atgtacatcaygtcccttcct

SEQ ID NO: 12569 - DNA, 21 bp, Homo sapiens
atgagtgatcrtttccagtca

SEQ ID NO: 12570 - DNA, 21 bp, Homo sapiens
atactacctcrtttccatgat

SEQ ID NO: 12571 - DNA, 21 bp, Homo sapiens
aatttgaaacycgtttgatgg

SEQ ID NO: 12572 - DNA, 21 bp, Homo sapiens
gagaggaagartgggctctga

SEQ ID NO: 12573 - DNA, 21 bp, Homo sapiens
caccatatcarattgaatact

SEQ ID NO: 12574 - DNA, 21 bp, Homo sapiens
aaacccacacrgtattttaag

SEQ ID NO: 12575 - DNA, 21 bp, Homo sapiens
ggcttgtgacrtggtctttgt

SEQ ID NO: 12576 - DNA, 21 bp, Homo sapiens
aattgggttcygtgaaagcaa

SEQ ID NO: 12577 - DNA, 21 bp, Homo sapiens
actattattcyatccagattc

SEQ ID NO: 12578 - DNA, 21 bp, Homo sapiens
tgtggttattrgtaagatgtg

SEQ ID NO: 12579 - DNA, 21 bp, Homo sapiens
gtaagtatgcrtgggaacagt

SEQ ID NO: 12580 - DNA, 21 bp, Homo sapiens
ggcaaaaaacygttcagagat

SEQ ID NO: 12581 - DNA, 21 bp, Homo sapiens
gatacaaaggrctatcatatc

SEQ ID NO: 12582 - DNA, 21 bp, Homo sapiens
aacagtgctcrgaagtcaagg

SEQ ID NO: 12583 - DNA, 21 bp, Homo sapiens
cacttgagatrtggccggtca

SEQ ID NO: 12584 - DNA, 21 bp, Homo sapiens
gcctttcatargaccacatcc

SEQ ID NO: 12585 - DNA, 21 bp, Homo sapiens
tcaaggctgtrttaaggttac

SEQ ID NO: 12586 - DNA, 21 bp, Homo sapiens
ctgaaatacartgactgagaa

SEQ ID NO: 12587 - DNA, 21 bp, Homo sapiens
gagatcctccrgtatcaaatc

SEQ ID NO: 12588 - DNA, 21 bp, Homo sapiens
aaacattatcrtcttttgtcc

SEQ ID NO: 12589 - DNA, 21 bp, Homo sapiens
gcacccagacrttaccaaatg

SEQ ID NO: 12590 - DNA, 21 bp, Homo sapiens
ttctttctaayagttctcaag

SEQ ID NO: 12591 - DNA, 21 bp, Homo sapiens
ccatcatttcrtgccctggcc

SEQ ID NO: 12592 - DNA, 21 bp, Homo sapiens
tccctgagatratttctatgc

SEQ ID NO: 12593 - DNA, 21 bp, Homo sapiens
gatagggccarctgtttttat

SEQ ID NO: 12594 - DNA, 21 bp, Homo sapiens
tcggtgggtgytcagggaaca

SEQ ID NO: 12595 - DNA, 21 bp, Homo sapiens
atccctctttyacttgagcaa

SEQ ID NO: 12596 - DNA, 21 bp, Homo sapiens
cctcccgggargtctctgacc

SEQ ID NO: 12597 - DNA, 21 bp, Homo sapiens
gcaaggaggcrttctgctcca

SEQ ID NO: 12598 - DNA, 21 bp, Homo sapiens
tccacgacgayagtatttcaa

SEQ ID NO: 12599 - DNA, 21 bp, Homo sapiens
aggaatttggrttctttagat

SEQ ID NO: 12600 - DNA, 21 bp, Homo sapiens
cagacagctckcagagcattc

SEQ ID NO: 12601 - DNA, 21 bp, Homo sapiens
agctggaaagrcatgtggaga

SEQ ID NO: 12602 - DNA, 21 bp, Homo sapiens
tacacttcgcraaggtaccac

SEQ ID NO: 12603 - DNA, 21 bp, Homo sapiens
gtagagatacraaagatatat

SEQ ID NO: 12604 - DNA, 21 bp, Homo sapiens
tcatgtcagcygctcccacca

SEQ ID NO: 12605 - DNA, 21 bp, Homo sapiens
catgtggagcygtgagtatct

SEQ ID NO: 12606 - DNA, 21 bp, Homo sapiens
tgagatcattmcatggttata

SEQ ID NO: 12607 - DNA, 21 bp, Homo sapiens
tgttttggacyatcccaaagc

SEQ ID NO: 12608 - DNA, 21 bp, Homo sapiens
gctgcactgcrccagaagaaa

SEQ ID NO: 12609 - DNA, 21 bp, Homo sapiens
cctttcattcrtgtaccataa

SEQ ID NO: 12610 - DNA, 21 bp, Homo sapiens
aaaaggggttyatctttgtat

SEQ ID NO: 12611 - DNA, 21 bp, Homo sapiens
tagcttgaaayagaccatggt

SEQ ID NO: 12612 - DNA, 21 bp, Homo sapiens
tagatagcccrctgaccaacc

SEQ ID NO: 12613 - DNA, 21 bp, Homo sapiens
aattccttccrtataccctga

SEQ ID NO: 12614 - DNA, 21 bp, Homo sapiens
actgaactgayggtaaatcca

SEQ ID NO: 12615 - DNA, 21 bp, Homo sapiens
agccaatctcyaaaagggtga

SEQ ID NO: 12616 - DNA, 21 bp, Homo sapiens
cagttcattakgcagggacgg

SEQ ID NO: 12617 - DNA, 21 bp, Homo sapiens
tatcatgctcrgccatctgtg

SEQ ID NO: 12618 - DNA, 21 bp, Homo sapiens
aacaggcatargccaagtctg

SEQ ID NO: 12619 - DNA, 21 bp, Homo sapiens
ttaaatgtaaycaatttctgt

SEQ ID NO: 12620 - DNA, 21 bp, Homo sapiens
tggtgcatccrgcctaatgca

SEQ ID NO: 12621 - DNA, 21 bp, Homo sapiens
tgcggttgttrctcttattta

SEQ ID NO: 12622 - DNA, 21 bp, Homo sapiens
aaaagaccaayttgtactgaa

SEQ ID NO: 12623 - DNA, 21 bp, Homo sapiens
cgtaaatctcrgttcctccca

SEQ ID NO: 12624 - DNA, 21 bp, Homo sapiens
ttgttgtggartggttgggac

SEQ ID NO: 12625 - DNA, 21 bp, Homo sapiens
cactctctagrtttctggcag

SEQ ID NO: 12626 - DNA, 21 bp, Homo sapiens
tgaggccaccrtggcgggagg

SEQ ID NO: 12627 - DNA, 21 bp, Homo sapiens
agccagcagcmccttgtccac

SEQ ID NO: 12628 - DNA, 21 bp, Homo sapiens
gcagtgtcctrggattgttta

SEQ ID NO: 12629 - DNA, 21 bp, Homo sapiens
tttaaagtatrtatcatatca

SEQ ID NO: 12630 - DNA, 21 bp, Homo sapiens
cccctggtccygaggaggact

SEQ ID NO: 12631 - DNA, 21 bp, Homo sapiens
ctgccaggggkctcatgatat

SEQ ID NO: 12632 - DNA, 21 bp, Homo sapiens
tggagctgaaygtaaacggct

SEQ ID NO: 12633 - DNA, 21 bp, Homo sapiens
ctctagctggrgaagcaggag

SEQ ID NO: 12634 - DNA, 21 bp, Homo sapiens
gccccgcggcmggagtcgctg

SEQ ID NO: 12635 - DNA, 21 bp, Homo sapiens
acccaagggcrcacactgggg

SEQ ID NO: 12636 - DNA, 21 bp, Homo sapiens
atccatagacrtgtttctcta

SEQ ID NO: 12637 - DNA, 21 bp, Homo sapiens
agttaaaatcytgtctctagg

SEQ ID NO: 12638 - DNA, 21 bp, Homo sapiens
acaaataagtkccaaagctga

SEQ ID NO: 12639 - DNA, 21 bp, Homo sapiens
aattccatgayataaaacctg

SEQ ID NO: 12640 - DNA, 21 bp, Homo sapiens
atgaacacccrccattttacc

SEQ ID NO: 12641 - DNA, 21 bp, Homo sapiens
ttgaattttgrtgtaagaatc

SEQ ID NO: 12642 - DNA, 21 bp, Homo sapiens
ctagccactcrtgaagataat

SEQ ID NO: 12643 - DNA, 21 bp, Homo sapiens
acagaagattrtttttgagac

SEQ ID NO: 12644 - DNA, 21 bp, Homo sapiens
agtgttataaytacatgtggc

SEQ ID NO: 12645 - DNA, 21 bp, Homo sapiens
cactgagcctrgctgtatgta

SEQ ID NO: 12646 - DNA, 21 bp, Homo sapiens
tcttgaaccaycagaatggca

SEQ ID NO: 12647 - DNA, 21 bp, Homo sapiens
tgctcaaatgycaaacacaaa

SEQ ID NO: 12648 - DNA, 21 bp, Homo sapiens
aggcatcacakaggtgcaacc

SEQ ID NO: 12649 - DNA, 21 bp, Homo sapiens
ctacaaagacrcagaagacca

SEQ ID NO: 12650 - DNA, 21 bp, Homo sapiens
gggaaaaataytggatgtctg

SEQ ID NO: 12651 - DNA, 21 bp, Homo sapiens
ttaaagaccayaaaggcataa

SEQ ID NO: 12652 - DNA, 21 bp, Homo sapiens
aattagttttycctacagcca

SEQ ID NO: 12653 - DNA, 21 bp, Homo sapiens
tgtacagatayaggaaatgga

SEQ ID NO: 12654 - DNA, 21 bp, Homo sapiens
attcacttggrcgaccccata

SEQ ID NO: 12655 - DNA, 21 bp, Homo sapiens
aacagataaayattttaaaat

SEQ ID NO: 12656 - DNA, 21 bp, Homo sapiens
ttagcaatttrgcatacatat

SEQ ID NO: 12657 - DNA, 21 bp, Homo sapiens
taataataatytctaagggct

SEQ ID NO: 12658 - DNA, 21 bp, Homo sapiens
ttaagacctamgtcgttcacc

SEQ ID NO: 12659 - DNA, 21 bp, Homo sapiens
atattaatacyttctatttta

SEQ ID NO: 12660 - DNA, 21 bp, Homo sapiens
ctgtgcctctyggtatgaatc

SEQ ID NO: 12661 - DNA, 21 bp, Homo sapiens
aaaaagaaccrgagctccctg

SEQ ID NO: 12662 - DNA, 21 bp, Homo sapiens
acagtatgaamcaaccacaag

SEQ ID NO: 12663 - DNA, 21 bp, Homo sapiens
gtattgttttrccgtgccagg

SEQ ID NO: 12664 - DNA, 21 bp, Homo sapiens
atcatttatcrggtactttct

SEQ ID NO: 12665 - DNA, 21 bp, Homo sapiens
tgaggcctgtkctatttaacc

SEQ ID NO: 12666 - DNA, 21 bp, Homo sapiens
gaagagaagtrgaaaaatacg

SEQ ID NO: 12667 - DNA, 21 bp, Homo sapiens
ccaggactccrttctccgtgg

SEQ ID NO: 12668 - DNA, 21 bp, Homo sapiens
tttagtttacyaatccttaga

SEQ ID NO: 12669 - DNA, 21 bp, Homo sapiens
gtgcaggcgcycctccactcc

SEQ ID NO: 12670 - DNA, 21 bp, Homo sapiens
tcacttcctcragcggtcgcc

SEQ ID NO: 12671 - DNA, 21 bp, Homo sapiens
gacaaaggggygtgcctcaga

SEQ ID NO: 12672 - DNA, 21 bp, Homo sapiens
ccagctgccgkttcagtttca

SEQ ID NO: 12673 - DNA, 21 bp, Homo sapiens
acctcatctgycttactactg

SEQ ID NO: 12674 - DNA, 21 bp, Homo sapiens
agtagattccmccacccgaat

SEQ ID NO: 12675 - DNA, 21 bp, Homo sapiens
cttgcaaaacrttagtggtag

SEQ ID NO: 12676 - DNA, 21 bp, Homo sapiens
tgacattaccrcttgcctgtg

SEQ ID NO: 12677 - DNA, 21 bp, Homo sapiens
caacagcgtgrgttcacttct

SEQ ID NO: 12678 - DNA, 21 bp, Homo sapiens
gcattaactartttttttttt

SEQ ID NO: 12679 - DNA, 21 bp, Homo sapiens
cttcaaatacmtgatgcttac

SEQ ID NO: 12680 - DNA, 21 bp, Homo sapiens
tccatacgatrtcattggctt

SEQ ID NO: 12681 - DNA, 21 bp, Homo sapiens
agtaaagtggrtgaataaaaa

SEQ ID NO: 12682 - DNA, 21 bp, Homo sapiens
ccgtcactcaygcaacagaga

SEQ ID NO: 12683 - DNA, 21 bp, Homo sapiens
gagggggtaakgaaggcttct

SEQ ID NO: 12684 - DNA, 21 bp, Homo sapiens
tgggtcctggkgctcaaagtc

SEQ ID NO: 12685 - DNA, 21 bp, Homo sapiens
caccagctagmgagtggcaca

SEQ ID NO: 12686 - DNA, 21 bp, Homo sapiens
tcaaactactmtgtgcatcca

SEQ ID NO: 12687 - DNA, 21 bp, Homo sapiens
ctcatatattragtattttga

SEQ ID NO: 12688 - DNA, 21 bp, Homo sapiens
tttgggtccakctgttggacc

SEQ ID NO: 12689 - DNA, 21 bp, Homo sapiens
ttctttccctyattgcttgtt

SEQ ID NO: 12690 - DNA, 21 bp, Homo sapiens
ggacatgaacracagctatct

SEQ ID NO: 12691 - DNA, 21 bp, Homo sapiens
ttttaaatctrttactgtgaa

SEQ ID NO: 12692 - DNA, 21 bp, Homo sapiens
tcataaaggartaggtatttg

SEQ ID NO: 12693 - DNA, 21 bp, Homo sapiens
gctgagaattrtagagaactg

SEQ ID NO: 12694 - DNA, 21 bp, Homo sapiens
agtaaccttgrttctactatt

SEQ ID NO: 12695 - DNA, 21 bp, Homo sapiens
catgctgtgayacggaaatat

SEQ ID NO: 12696 - DNA, 21 bp, Homo sapiens
gagtcattcayggcaacagcc

SEQ ID NO: 12697 - DNA, 21 bp, Homo sapiens
catggctctcrtgggcgtgtc

SEQ ID NO: 12698 - DNA, 21 bp, Homo sapiens
gctcacagctkctcaaatggg

SEQ ID NO: 12699 - DNA, 21 bp, Homo sapiens
cttcctcaatycattctccat

SEQ ID NO: 12700 - DNA, 21 bp, Homo sapiens
tctggccacaractctttcca

SEQ ID NO: 12701 - DNA, 21 bp, Homo sapiens
tctctctactkccctattata

SEQ ID NO: 12702 - DNA, 21 bp, Homo sapiens
ttcataagatrgtagaaaggg

SEQ ID NO: 12703 - DNA, 21 bp, Homo sapiens
cacaggcccaygaaggttact

SEQ ID NO: 12704 - DNA, 21 bp, Homo sapiens
tatgtaacccktgaatccttc

SEQ ID NO: 12705 - DNA, 21 bp, Homo sapiens
actcaacttayattaaaggaa

SEQ ID NO: 12706 - DNA, 21 bp, Homo sapiens
ttttctcagcragggagaatc

SEQ ID NO: 12707 - DNA, 21 bp, Homo sapiens
ttttcttcttmttattattat

SEQ ID NO: 12708 - DNA, 21 bp, Homo sapiens
acatactgggrcttcagtggg

SEQ ID NO: 12709 - DNA, 21 bp, Homo sapiens
attcatggatrtgaggcatgt

SEQ ID NO: 12710 - DNA, 21 bp, Homo sapiens
gaggggccaaractacagatt

SEQ ID NO: 12711 - DNA, 21 bp, Homo sapiens
gggagtgctgrcactcgttat

SEQ ID NO: 12712 - DNA, 21 bp, Homo sapiens
aggaatttctrttgttagaaa

SEQ ID NO: 12713 - DNA, 21 bp, Homo sapiens
gaggccaggarccatgcttac

SEQ ID NO: 12714 - DNA, 21 bp, Homo sapiens
agcctttccamcctcatcagt

SEQ ID NO: 12715 - DNA, 21 bp, Homo sapiens
gtctctctctrtttcctttat

SEQ ID NO: 12716 - DNA, 21 bp, Homo sapiens
tattttgcaayatgcctgaca

SEQ ID NO: 12717 - DNA, 21 bp, Homo sapiens
acagccttatkaggaagataa

SEQ ID NO: 12718 - DNA, 21 bp, Homo sapiens
aacagttgctrtatcagcaga

SEQ ID NO: 12719 - DNA, 21 bp, Homo sapiens
tgcatttcaakaatatctcag

SEQ ID NO: 12720 - DNA, 21 bp, Homo sapiens
tgaggcatgcyggatctctgt

SEQ ID NO: 12721 - DNA, 21 bp, Homo sapiens
tgtagaaggtkaatcctgaat

SEQ ID NO: 12722 - DNA, 21 bp, Homo sapiens
tatatactggytgactcaaaa

SEQ ID NO: 12723 - DNA, 21 bp, Homo sapiens
gcaactaacaygaaaatggac

SEQ ID NO: 12724 - DNA, 21 bp, Homo sapiens
tgctgcaatarcatggattca

SEQ ID NO: 12725 - DNA, 21 bp, Homo sapiens
ctagagccaaytctttcagcg

SEQ ID NO: 12726 - DNA, 21 bp, Homo sapiens
ggaggagttaygaatggttaa

SEQ ID NO: 12727 - DNA, 21 bp, Homo sapiens
ttattgcctakttaagggatt

SEQ ID NO: 12728 - DNA, 21 bp, Homo sapiens
gttctaatgcygattctgaaa

SEQ ID NO: 12729 - DNA, 21 bp, Homo sapiens
aataataaagytcgtaggttg

SEQ ID NO: 12730 - DNA, 21 bp, Homo sapiens
acagccaaaaracacaactat

SEQ ID NO: 12731 - DNA, 21 bp, Homo sapiens
aagcagaataygcgttgtttt

SEQ ID NO: 12732 - DNA, 21 bp, Homo sapiens
tcctatttcartgcccttatt

SEQ ID NO: 12733 - DNA, 21 bp, Homo sapiens
gggctgtgctygcaaatgatt

SEQ ID NO: 12734 - DNA, 21 bp, Homo sapiens
atgtaacatcragagttacaa

SEQ ID NO: 12735 - DNA, 21 bp, Homo sapiens
ttgctctccaragagtttaag

SEQ ID NO: 12736 - DNA, 21 bp, Homo sapiens
acactgctttyttctaaacta

SEQ ID NO: 12737 - DNA, 21 bp, Homo sapiens
gctgatgagcyggacagggct

SEQ ID NO: 12738 - DNA, 21 bp, Homo sapiens
ttccctaaacrtacctagaag

SEQ ID NO: 12739 - DNA, 21 bp, Homo sapiens
gcagacaaaayatccaaacca

SEQ ID NO: 12740 - DNA, 21 bp, Homo sapiens
taccgagagcyctgctgacat

SEQ ID NO: 12741 - DNA, 21 bp, Homo sapiens
ctctaagagtyttccaaacac

SEQ ID NO: 12742 - DNA, 21 bp, Homo sapiens
catcagtctcrcctccccagc

SEQ ID NO: 12743 - DNA, 21 bp, Homo sapiens
gacatctccgrgggagggcgg

SEQ ID NO: 12744 - DNA, 21 bp, Homo sapiens
ctgggaaaatygaaattacaa

SEQ ID NO: 12745 - DNA, 21 bp, Homo sapiens
aagaagaggcrtaatatacca

SEQ ID NO: 12746 - DNA, 21 bp, Homo sapiens
agtttgactgrcggtctttcc

SEQ ID NO: 12747 - DNA, 21 bp, Homo sapiens
acttttcttartttaccttct

SEQ ID NO: 12748 - DNA, 21 bp, Homo sapiens
ttgtttcagcycaagctcgct

SEQ ID NO: 12749 - DNA, 21 bp, Homo sapiens
agcaatgtctrgagacatttt

SEQ ID NO: 12750 - DNA, 21 bp, Homo sapiens
ggttgggtgayctaccagcat

SEQ ID NO: 12751 - DNA, 21 bp, Homo sapiens
tgctcttcccrgaccagaaat

SEQ ID NO: 12752 - DNA, 21 bp, Homo sapiens
aaggatggtgkaaagacagtc

SEQ ID NO: 12753 - DNA, 21 bp, Homo sapiens
gcttctccagytcttttagcc

SEQ ID NO: 12754 - DNA, 21 bp, Homo sapiens
cccactggagktaagaagagt

SEQ ID NO: 12755 - DNA, 21 bp, Homo sapiens
gttaagaagartagagtttga

SEQ ID NO: 12756 - DNA, 21 bp, Homo sapiens
agacttagatrtggggttgca

SEQ ID NO: 12757 - DNA, 21 bp, Homo sapiens
tagcctccccygccaaaaaaa

SEQ ID NO: 12758 - DNA, 21 bp, Homo sapiens
agttaaactartaatttgccc

SEQ ID NO: 12759 - DNA, 21 bp, Homo sapiens
cagggctttgrccaactagca

SEQ ID NO: 12760 - DNA, 21 bp, Homo sapiens
aagacaaaatygctatcactg

SEQ ID NO: 12761 - DNA, 21 bp, Homo sapiens
ggtgagcttayggctggcatg

SEQ ID NO: 12762 - DNA, 21 bp, Homo sapiens
atccaggggaytttggaataa

SEQ ID NO: 12763 - DNA, 21 bp, Homo sapiens
ccttctgtgtytcactctacc

SEQ ID NO: 12764 - DNA, 21 bp, Homo sapiens
aaataacaacygttcattata

SEQ ID NO: 12765 - DNA, 21 bp, Homo sapiens
cagtgtgcatrtaaagggagt

SEQ ID NO: 12766 - DNA, 21 bp, Homo sapiens
ggtttaccttyaactggtttc

SEQ ID NO: 12767 - DNA, 21 bp, Homo sapiens
tatcagttttyctctgggagg

SEQ ID NO: 12768 - DNA, 21 bp, Homo sapiens
aatcttgtcayaggaggatgg

SEQ ID NO: 12769 - DNA, 21 bp, Homo sapiens
atgttgacctyataaatttgt

SEQ ID NO: 12770 - DNA, 21 bp, Homo sapiens
agccttgtccygaaacatcta

SEQ ID NO: 12771 - DNA, 21 bp, Homo sapiens
tgtcatttgtrttctccccat

SEQ ID NO: 12772 - DNA, 21 bp, Homo sapiens
ttcaccttagycagttcagtc

SEQ ID NO: 12773 - DNA, 21 bp, Homo sapiens
tcaaaaatctkccattgttgt

SEQ ID NO: 12774 - DNA, 21 bp, Homo sapiens
tttgcccatgragtccttgcc

SEQ ID NO: 12775 - DNA, 21 bp, Homo sapiens
aagtcttcctrtttcctagtc

SEQ ID NO: 12776 - DNA, 21 bp, Homo sapiens
ttggcttccargccccccctg

SEQ ID NO: 12777 - DNA, 21 bp, Homo sapiens
agtacacccaygtcaacagag

SEQ ID NO: 12778 - DNA, 21 bp, Homo sapiens
aatcttgctakatcttattag

SEQ ID NO: 12779 - DNA, 21 bp, Homo sapiens
aagtctaacaygcagctctga

SEQ ID NO: 12780 - DNA, 21 bp, Homo sapiens
ggcaaagagaygggaaaatgt

SEQ ID NO: 12781 - DNA, 21 bp, Homo sapiens
tctgaatatayctagttttgt

SEQ ID NO: 12782 - DNA, 21 bp, Homo sapiens
ttgtacaggtrtaataattca

SEQ ID NO: 12783 - DNA, 21 bp, Homo sapiens
ttcttcacagyggcagccttg

SEQ ID NO: 12784 - DNA, 21 bp, Homo sapiens
gctgcatgatytctcctttaa

SEQ ID NO: 12785 - DNA, 21 bp, Homo sapiens
tataaagagayacaaacagct

SEQ ID NO: 12786 - DNA, 21 bp, Homo sapiens
gtatggttttrgtatgccaaa

SEQ ID NO: 12787 - DNA, 21 bp, Homo sapiens
aaatggtgtaraagtccagct

SEQ ID NO: 12788 - DNA, 21 bp, Homo sapiens
gttgactcttytgctggcttc

SEQ ID NO: 12789 - DNA, 21 bp, Homo sapiens
accccttacaygtcaaaaatg

SEQ ID NO: 12790 - DNA, 21 bp, Homo sapiens
ttcggcacttyggcaagtaag

SEQ ID NO: 12791 - DNA, 21 bp, Homo sapiens
caccaacacartgaatcttac

SEQ ID NO: 12792 - DNA, 21 bp, Homo sapiens
acaaacagaaracagttttaa

SEQ ID NO: 12793 - DNA, 21 bp, Homo sapiens
ccagccattakttcttgaaca

SEQ ID NO: 12794 - DNA, 21 bp, Homo sapiens
gcctccctcartttgggctac

SEQ ID NO: 12795 - DNA, 21 bp, Homo sapiens
gccagggccaygtgtcaatca

SEQ ID NO: 12796 - DNA, 21 bp, Homo sapiens
ctcagcatgcyacctgaagca

SEQ ID NO: 12797 - DNA, 21 bp, Homo sapiens
atttctaaagyctttgaactg

SEQ ID NO: 12798 - DNA, 21 bp, Homo sapiens
ccatggctggktcttccccac

SEQ ID NO: 12799 - DNA, 21 bp, Homo sapiens
actcctgagakagtgtaatta

SEQ ID NO: 12800 - DNA, 21 bp, Homo sapiens
ggtttctgatmtctctccagg

SEQ ID NO: 12801 - DNA, 21 bp, Homo sapiens
gtatataactmaaggtaatgg

SEQ ID NO: 12802 - DNA, 21 bp, Homo sapiens
cacagagggtrcctgaaatgg

SEQ ID NO: 12803 - DNA, 21 bp, Homo sapiens
tgaggaaggaratccccgctg

SEQ ID NO: 12804 - DNA, 21 bp, Homo sapiens
cctcggtctcmgttatgtaaa

SEQ ID NO: 12805 - DNA, 21 bp, Homo sapiens
cccacacccgrccgtgatttc

SEQ ID NO: 12806 - DNA, 21 bp, Homo sapiens
gattgtcatcygccaatcaca

SEQ ID NO: 12807 - DNA, 21 bp, Homo sapiens
agagtcaaggrtgctaatgga

SEQ ID NO: 12808 - DNA, 21 bp, Homo sapiens
agccttaggtyactgctctct

SEQ ID NO: 12809 - DNA, 21 bp, Homo sapiens
atattcaccaygactctgaag

SEQ ID NO: 12810 - DNA, 21 bp, Homo sapiens
aaatggagcaktgagttgtta

SEQ ID NO: 12811 - DNA, 21 bp, Homo sapiens
acagtatgtamttttataatt

SEQ ID NO: 12812 - DNA, 21 bp, Homo sapiens
agtacagcccrgatacagtgg

SEQ ID NO: 12813 - DNA, 21 bp, Homo sapiens
taaaaggtgayagtttggcat

SEQ ID NO: 12814 - DNA, 21 bp, Homo sapiens
ggcaatctctyttctctcgac

SEQ ID NO: 12815 - DNA, 21 bp, Homo sapiens
cttccagttgytctgttaagt

SEQ ID NO: 12816 - DNA, 21 bp, Homo sapiens
cagtatttccrtccttgtact

SEQ ID NO: 12817 - DNA, 21 bp, Homo sapiens
tcaattagtgygtgggtgttt

SEQ ID NO: 12818 - DNA, 21 bp, Homo sapiens
ctgtagagttygacctttgag

SEQ ID NO: 12819 - DNA, 21 bp, Homo sapiens
gaaaaagtgcrcacacagtaa

SEQ ID NO: 12820 - DNA, 21 bp, Homo sapiens
gagttgggaakgagctatgtt

SEQ ID NO: 12821 - DNA, 21 bp, Homo sapiens
atagagtacamgtcttcagaa

SEQ ID NO: 12822 - DNA, 21 bp, Homo sapiens
ctagaaaggcmgggacacttg

SEQ ID NO: 12823 - DNA, 21 bp, Homo sapiens
aaagatcttartaaggtggtg

SEQ ID NO: 12824 - DNA, 21 bp, Homo sapiens
ttgttattccyattttttgaa

SEQ ID NO: 12825 - DNA, 21 bp, Homo sapiens
aaataaagaaygcttcctttt

SEQ ID NO: 12826 - DNA, 21 bp, Homo sapiens
tttcaataacrtgcagcatca

SEQ ID NO: 12827 - DNA, 21 bp, Homo sapiens
tctagttatcrtagaattcag

SEQ ID NO: 12828 - DNA, 21 bp, Homo sapiens
acactgaaatrtaatagggaa

SEQ ID NO: 12829 - DNA, 21 bp, Homo sapiens
tcctttgtggrgaattattga

SEQ ID NO: 12830 - DNA, 21 bp, Homo sapiens
tccacccagayagcatgacag

SEQ ID NO: 12831 - DNA, 21 bp, Homo sapiens
tgaatttcctrgtttagatta

SEQ ID NO: 12832 - DNA, 21 bp, Homo sapiens
aaataactctkcaaataaaac

SEQ ID NO: 12833 - DNA, 21 bp, Homo sapiens
tttgaaactgyggaatgggct

SEQ ID NO: 12834 - DNA, 21 bp, Homo sapiens
gtcaatgtgamctttaaatca

SEQ ID NO: 12835 - DNA, 21 bp, Homo sapiens
tccgaagcagrcattgtatca

SEQ ID NO: 12836 - DNA, 21 bp, Homo sapiens
ggggaggggargtgtgagttg

SEQ ID NO: 12837 - DNA, 21 bp, Homo sapiens
ggacatcagcygacacagacc

SEQ ID NO: 12838 - DNA, 21 bp, Homo sapiens
aattttgtccytagttgggta

SEQ ID NO: 12839 - DNA, 21 bp, Homo sapiens
tgcacacacaygggctctttg

SEQ ID NO: 12840 - DNA, 21 bp, Homo sapiens
caaagccaaamgttttactat

SEQ ID NO: 12841 - DNA, 21 bp, Homo sapiens
tttttcgttcrtaatgccctg

SEQ ID NO: 12842 - DNA, 21 bp, Homo sapiens
accatatccaygagcattggc

SEQ ID NO: 12843 - DNA, 21 bp, Homo sapiens
tgattaaatcytttactttct

SEQ ID NO: 12844 - DNA, 21 bp, Homo sapiens
ctggtctacaygtggtttcta

SEQ ID NO: 12845 - DNA, 21 bp, Homo sapiens
tgcagcatagytctatatttc

SEQ ID NO: 12846 - DNA, 21 bp, Homo sapiens
atgttggtcaktccaatcttc

SEQ ID NO: 12847 - DNA, 21 bp, Homo sapiens
ctagggttggrgttaaatctt

SEQ ID NO: 12848 - DNA, 21 bp, Homo sapiens
atttatactcmttcattcatt

SEQ ID NO: 12849 - DNA, 21 bp, Homo sapiens
cagtttgtcartatcaccaaa

SEQ ID NO: 12850 - DNA, 21 bp, Homo sapiens
gtaagtctgtrtaaattaatg

SEQ ID NO: 12851 - DNA, 21 bp, Homo sapiens
tttgtcatttygggatgagaa

SEQ ID NO: 12852 - DNA, 21 bp, Homo sapiens
ccacttccatrtcctaccact

SEQ ID NO: 12853 - DNA, 21 bp, Homo sapiens
tagatcaccaragaagcccta

SEQ ID NO: 12854 - DNA, 21 bp, Homo sapiens
cggaaaaaaargccaccgtgg

SEQ ID NO: 12855 - DNA, 21 bp, Homo sapiens
aggaagaaagmgatgtgggaa

SEQ ID NO: 12856 - DNA, 21 bp, Homo sapiens
ttaacttccakgcaccttagg

SEQ ID NO: 12857 - DNA, 21 bp, Homo sapiens
acagggtcctmgtagatatat

SEQ ID NO: 12858 - DNA, 21 bp, Homo sapiens
gggaaaaagaygagagacagc

SEQ ID NO: 12859 - DNA, 21 bp, Homo sapiens
gatgtatggcktaacaagggg

SEQ ID NO: 12860 - DNA, 21 bp, Homo sapiens
aggaggctctrgtgaagagct

SEQ ID NO: 12861 - DNA, 21 bp, Homo sapiens
gagcaggagayggaatagcag

SEQ ID NO: 12862 - DNA, 21 bp, Homo sapiens
tcatattcctyggcaaagagt

SEQ ID NO: 12863 - DNA, 21 bp, Homo sapiens
caggcaatgtrccctccaact

SEQ ID NO: 12864 - DNA, 21 bp, Homo sapiens
cagtaaaactmactataaagt

SEQ ID NO: 12865 - DNA, 21 bp, Homo sapiens
accttttgcaygggatgggat

SEQ ID NO: 12866 - DNA, 21 bp, Homo sapiens
ttgcaaatagytcttagttat

SEQ ID NO: 12867 - DNA, 21 bp, Homo sapiens
ataaatggaaracatcagcct

SEQ ID NO: 12868 - DNA, 21 bp, Homo sapiens
ttaattggctrggtcattttg

SEQ ID NO: 12869 - DNA, 21 bp, Homo sapiens
aaagtgacagrtgttaaatca

SEQ ID NO: 12870 - DNA, 21 bp, Homo sapiens
aactgactgcrgtaaagcttg

SEQ ID NO: 12871 - DNA, 21 bp, Homo sapiens
cagtctcaccyatcatttctc

SEQ ID NO: 12872 - DNA, 21 bp, Homo sapiens
gagtgtcagtyctcagggatg

SEQ ID NO: 12873 - DNA, 21 bp, Homo sapiens
ctaaattgaaygcatattggc

SEQ ID NO: 12874 - DNA, 21 bp, Homo sapiens
cacttactggmaagctatgca

SEQ ID NO: 12875 - DNA, 21 bp, Homo sapiens
aatggaaaacyatctcatgca

SEQ ID NO: 12876 - DNA, 21 bp, Homo sapiens
tcagctaatgytactgaaagc

SEQ ID NO: 12877 - DNA, 21 bp, Homo sapiens
acacatacatmttccactaat

SEQ ID NO: 12878 - DNA, 21 bp, Homo sapiens
ttgaacaaacmaaccaaccga

SEQ ID NO: 12879 - DNA, 21 bp, Homo sapiens
catttcttgtycgtattcttt

SEQ ID NO: 12880 - DNA, 21 bp, Homo sapiens
cgcaaagtaayacattggaaa

SEQ ID NO: 12881 - DNA, 21 bp, Homo sapiens
atatttttctyatccatccta

SEQ ID NO: 12882 - DNA, 21 bp, Homo sapiens
ggtggcattayatgtgcttca

SEQ ID NO: 12883 - DNA, 21 bp, Homo sapiens
aggagaatacmcttttggtaa

SEQ ID NO: 12884 - DNA, 21 bp, Homo sapiens
atggtaaattrcatgggtatt

SEQ ID NO: 12885 - DNA, 21 bp, Homo sapiens
tgacaaagcartttcaatgga

SEQ ID NO: 12886 - DNA, 21 bp, Homo sapiens
cttcagagacytgggaatcaa

SEQ ID NO: 12887 - DNA, 21 bp, Homo sapiens
ctcttgtgctrgtattttctt

SEQ ID NO: 12888 - DNA, 21 bp, Homo sapiens
aattttggtgyccatgtgttc

SEQ ID NO: 12889 - DNA, 21 bp, Homo sapiens
taacatggggmatagaccaca

SEQ ID NO: 12890 - DNA, 21 bp, Homo sapiens
agacattactkgtacactata

SEQ ID NO: 12891 - DNA, 21 bp, Homo sapiens
tgttactgctrttgccagggc

SEQ ID NO: 12892 - DNA, 21 bp, Homo sapiens
tttttatagayctttgtaaag

SEQ ID NO: 12893 - DNA, 21 bp, Homo sapiens
tgctaatgacraaaggtaaaa

SEQ ID NO: 12894 - DNA, 21 bp, Homo sapiens
agcaactgatkcaaagaacgc

SEQ ID NO: 12895 - DNA, 21 bp, Homo sapiens
ttatgccacakcatcaaaatg

SEQ ID NO: 12896 - DNA, 21 bp, Homo sapiens
ctatctacctkctttacagca

SEQ ID NO: 12897 - DNA, 21 bp, Homo sapiens
ttctccaactyattgatcatt

SEQ ID NO: 12898 - DNA, 21 bp, Homo sapiens
aaaatacataycatatgagct

SEQ ID NO: 12899 - DNA, 21 bp, Homo sapiens
aacttactatygttataaaat

SEQ ID NO: 12900 - DNA, 21 bp, Homo sapiens
tttcagaagarcagctcagca

SEQ ID NO: 12901 - DNA, 21 bp, Homo sapiens
gaaccccaacytaaaccaacg

SEQ ID NO: 12902 - DNA, 21 bp, Homo sapiens
ggccccccatrgcagaggcca

SEQ ID NO: 12903 - DNA, 21 bp, Homo sapiens
aagaggatagraaatatgcct

SEQ ID NO: 12904 - DNA, 21 bp, Homo sapiens
atattattccmctcaaagtgg

SEQ ID NO: 12905 - DNA, 21 bp, Homo sapiens
aaattaggagkgagaaagggc

SEQ ID NO: 12906 - DNA, 21 bp, Homo sapiens
atagaattacytatcacattg

SEQ ID NO: 12907 - DNA, 21 bp, Homo sapiens
cagggtaaagraggacatttt

SEQ ID NO: 12908 - DNA, 21 bp, Homo sapiens
aatgcatattrtaggacaact

SEQ ID NO: 12909 - DNA, 21 bp, Homo sapiens
attagtttgcrgggctgccat

SEQ ID NO: 12910 - DNA, 21 bp, Homo sapiens
gcacaattccrataaagttta

SEQ ID NO: 12911 - DNA, 21 bp, Homo sapiens
tgtcagccctyttcaggaatt

SEQ ID NO: 12912 - DNA, 21 bp, Homo sapiens
aataaataacygaacatattc

SEQ ID NO: 12913 - DNA, 21 bp, Homo sapiens
catttataacytctagagtga

SEQ ID NO: 12914 - DNA, 21 bp, Homo sapiens
ttcttactctkactctttttc

SEQ ID NO: 12915 - DNA, 21 bp, Homo sapiens
gtgagcaaacmgtagtaaatt

SEQ ID NO: 12916 - DNA, 21 bp, Homo sapiens
gtgagtttcayttaataagaa

SEQ ID NO: 12917 - DNA, 21 bp, Homo sapiens
tggaaaccggkgccatgtaag

SEQ ID NO: 12918 - DNA, 21 bp, Homo sapiens
tttgtactcakatttgtcact

SEQ ID NO: 12919 - DNA, 21 bp, Homo sapiens
cagcagtgaaygaggagacaa

SEQ ID NO: 12920 - DNA, 21 bp, Homo sapiens
acagaaaacartaattccttt

SEQ ID NO: 12921 - DNA, 21 bp, Homo sapiens
actattcccargatagtcccc

SEQ ID NO: 12922 - DNA, 21 bp, Homo sapiens
atgaccaaggycagaagcttt

SEQ ID NO: 12923 - DNA, 21 bp, Homo sapiens
taagctccaartgtcccaaca

SEQ ID NO: 12924 - DNA, 21 bp, Homo sapiens
gccaggccttyaacgactgac

SEQ ID NO: 12925 - DNA, 21 bp, Homo sapiens
ctgtaaacatyctttccctca

SEQ ID NO: 12926 - DNA, 21 bp, Homo sapiens
gtgccttcctrgggcccatga

SEQ ID NO: 12927 - DNA, 21 bp, Homo sapiens
cagggagattyattataagtt

SEQ ID NO: 12928 - DNA, 21 bp, Homo sapiens
tcctgtgaagmctcaaagcca

SEQ ID NO: 12929 - DNA, 21 bp, Homo sapiens
ggaggtggaaracagagggat

SEQ ID NO: 12930 - DNA, 21 bp, Homo sapiens
cttgagatcgycctccatctt

SEQ ID NO: 12931 - DNA, 21 bp, Homo sapiens
cccttagcaamttgttcttgg

SEQ ID NO: 12932 - DNA, 21 bp, Homo sapiens
agtaattccayttgctgagat

SEQ ID NO: 12933 - DNA, 21 bp, Homo sapiens
tagtatcaaayaatcagtggg

SEQ ID NO: 12934 - DNA, 21 bp, Homo sapiens
gtatcccctcyttgtgcttga

SEQ ID NO: 12935 - DNA, 21 bp, Homo sapiens
attcctgcaaraaaatctaga

SEQ ID NO: 12936 - DNA, 21 bp, Homo sapiens
aataactcctyattcctctcc

SEQ ID NO: 12937 - DNA, 21 bp, Homo sapiens
gatagctctcrgtgtgagttg

SEQ ID NO: 12938 - DNA, 21 bp, Homo sapiens
tgagggcaaayacatctcctt

SEQ ID NO: 12939 - DNA, 21 bp, Homo sapiens
atcttaaggcrtctctcgtgg

SEQ ID NO: 12940 - DNA, 21 bp, Homo sapiens
tagtatattcrttcaacaaac

SEQ ID NO: 12941 - DNA, 21 bp, Homo sapiens
ctgaccctctrccctgccact

SEQ ID NO: 12942 - DNA, 21 bp, Homo sapiens
agaatgagttrggaaaatttt

SEQ ID NO: 12943 - DNA, 21 bp, Homo sapiens
tttgctaaaarctattgctca

SEQ ID NO: 12944 - DNA, 21 bp, Homo sapiens
cgaatagttamgactcttcaa

SEQ ID NO: 12945 - DNA, 21 bp, Homo sapiens
tttttctactmtccaagcctt

SEQ ID NO: 12946 - DNA, 21 bp, Homo sapiens
tttatatcttyggtatggaaa

SEQ ID NO: 12947 - DNA, 21 bp, Homo sapiens
tgagtatagcycagagaacct

SEQ ID NO: 12948 - DNA, 21 bp, Homo sapiens
gctggcactgytttctgggaa

SEQ ID NO: 12949 - DNA, 21 bp, Homo sapiens
gttcctttgcyacctgttgca

SEQ ID NO: 12950 - DNA, 21 bp, Homo sapiens
tttcagagagmaattccctga

SEQ ID NO: 12951 - DNA, 21 bp, Homo sapiens
tctacttcagyagagctaaag

SEQ ID NO: 12952 - DNA, 21 bp, Homo sapiens
tgaaggcattkggatgtatca

SEQ ID NO: 12953 - DNA, 21 bp, Homo sapiens
taacaatcacratgaacacac

SEQ ID NO: 12954 - DNA, 21 bp, Homo sapiens
ggtactttgarttttggagtc

SEQ ID NO: 12955 - DNA, 21 bp, Homo sapiens
tcctcagcccytttctgggcc

SEQ ID NO: 12956 - DNA, 21 bp, Homo sapiens
gtggtaaaagyctaaaaaatg

SEQ ID NO: 12957 - DNA, 21 bp, Homo sapiens
ttttcttcaaycttggaatac

SEQ ID NO: 12958 - DNA, 21 bp, Homo sapiens
tgagacacagrgaaaaattta

SEQ ID NO: 12959 - DNA, 21 bp, Homo sapiens
cagggctaccrttttaagatt

SEQ ID NO: 12960 - DNA, 21 bp, Homo sapiens
tatcacaaatragctaatgcc

SEQ ID NO: 12961 - DNA, 21 bp, Homo sapiens
ttgcagtaaamtttctaggac

SEQ ID NO: 12962 - DNA, 21 bp, Homo sapiens
tttcataaggktgcctctggc

SEQ ID NO: 12963 - DNA, 21 bp, Homo sapiens
ccctggacctrtctagtggat

SEQ ID NO: 12964 - DNA, 21 bp, Homo sapiens
accaagaaatrtcttgaaagg

SEQ ID NO: 12965 - DNA, 21 bp, Homo sapiens
accaggagatyctttcctaga

SEQ ID NO: 12966 - DNA, 21 bp, Homo sapiens
tttcttttccratatatctcc

SEQ ID NO: 12967 - DNA, 21 bp, Homo sapiens
actagcttagygttttcttat

SEQ ID NO: 12968 - DNA, 21 bp, Homo sapiens
gcctgattgayactactcgat

SEQ ID NO: 12969 - DNA, 21 bp, Homo sapiens
aaacacatacmtgcacatatt

SEQ ID NO: 12970 - DNA, 21 bp, Homo sapiens
cagtgtttttrgtaatataga

SEQ ID NO: 12971 - DNA, 21 bp, Homo sapiens
ttgaggacacrgaagcacttt

SEQ ID NO: 12972 - DNA, 21 bp, Homo sapiens
aagaacaccargcagaattct

SEQ ID NO: 12973 - DNA, 21 bp, Homo sapiens
ctcctcagtaycctcccaacg

SEQ ID NO: 12974 - DNA, 21 bp, Homo sapiens
ttcaagaaatrcaaattaaaa

SEQ ID NO: 12975 - DNA, 21 bp, Homo sapiens
agtgccacatrgtatggagag

SEQ ID NO: 12976 - DNA, 21 bp, Homo sapiens
tattgctcatkgtttaaactt

SEQ ID NO: 12977 - DNA, 21 bp, Homo sapiens
taaaaatattraaagtacagt

SEQ ID NO: 12978 - DNA, 21 bp, Homo sapiens
cttgtcaaatrtaattaaaaa

SEQ ID NO: 12979 - DNA, 21 bp, Homo sapiens
ttgaagactargggtgagggt

SEQ ID NO: 12980 - DNA, 21 bp, Homo sapiens
cagttcgttcrcaatatattt

SEQ ID NO: 12981 - DNA, 21 bp, Homo sapiens
attttacttcrtgatgcgtat

SEQ ID NO: 12982 - DNA, 21 bp, Homo sapiens
acaaataaaakttgatagcag

SEQ ID NO: 12983 - DNA, 21 bp, Homo sapiens
ctatcctttcrgacagatgta

SEQ ID NO: 12984 - DNA, 21 bp, Homo sapiens
agtcagggcaraggatccagg

SEQ ID NO: 12985 - DNA, 21 bp, Homo sapiens
ttatttatccrcaatgttgtg

SEQ ID NO: 12986 - DNA, 21 bp, Homo sapiens
tcacaaatacygctagctgcc

SEQ ID NO: 12987 - DNA, 21 bp, Homo sapiens
cctgtcatttkatatgactgc

SEQ ID NO: 12988 - DNA, 21 bp, Homo sapiens
gctaatttggmtggtgtgttc

SEQ ID NO: 12989 - DNA, 21 bp, Homo sapiens
cctccagtcaktttatccaaa

SEQ ID NO: 12990 - DNA, 21 bp, Homo sapiens
ttggttacatktatcacaaaa

SEQ ID NO: 12991 - DNA, 21 bp, Homo sapiens
aacaactaggytatgtcgtat

SEQ ID NO: 12992 - DNA, 21 bp, Homo sapiens
ttgaccttaarccatttggtt

SEQ ID NO: 12993 - DNA, 21 bp, Homo sapiens
agtagtcatayactttaggct

SEQ ID NO: 12994 - DNA, 21 bp, Homo sapiens
aaaggaagttycaagaggact

SEQ ID NO: 12995 - DNA, 21 bp, Homo sapiens
gacaaatgctracattaacag

SEQ ID NO: 12996 - DNA, 21 bp, Homo sapiens
actgctttgcyattggacatc

SEQ ID NO: 12997 - DNA, 21 bp, Homo sapiens
cacttcacatkataaatagag

SEQ ID NO: 12998 - DNA, 21 bp, Homo sapiens
attaacatacratgttatagt

SEQ ID NO: 12999 - DNA, 21 bp, Homo sapiens
agtaagacatmgcctgaaagg

SEQ ID NO: 13000 - DNA, 21 bp, Homo sapiens
aaaagttggakatcctcagga

SEQ ID NO: 13001 - DNA, 21 bp, Homo sapiens
tcaagccaggractgtgatct

SEQ ID NO: 13002 - DNA, 21 bp, Homo sapiens
tcagacactgygggtttatat

SEQ ID NO: 13003 - DNA, 21 bp, Homo sapiens
attgaattgaygtgaatctgg

SEQ ID NO: 13004 - DNA, 21 bp, Homo sapiens
caagagaaacygaaggccagt

SEQ ID NO: 13005 - DNA, 21 bp, Homo sapiens
ttctgatcaaraggaatcccc

SEQ ID NO: 13006 - DNA, 21 bp, Homo sapiens
tagaattgtgyaattgcgtag

SEQ ID NO: 13007 - DNA, 21 bp, Homo sapiens
tttccacaacyggtgctataa

SEQ ID NO: 13008 - DNA, 21 bp, Homo sapiens
acacatctttmccaccttctt

SEQ ID NO: 13009 - DNA, 21 bp, Homo sapiens
tatcttaatgycaccattatt

SEQ ID NO: 13010 - DNA, 21 bp, Homo sapiens
atctgcggctrttacctctgc

SEQ ID NO: 13011 - DNA, 21 bp, Homo sapiens
gtggaagtagygaaataaact

SEQ ID NO: 13012 - DNA, 21 bp, Homo sapiens
cttcttaactrgacccatata

SEQ ID NO: 13013 - DNA, 21 bp, Homo sapiens
tagactttacracataggact

SEQ ID NO: 13014 - DNA, 21 bp, Homo sapiens
ctagatcttcyacacaaagag

SEQ ID NO: 13015 - DNA, 21 bp, Homo sapiens
agttgtttgtrtgtatatttc

SEQ ID NO: 13016 - DNA, 21 bp, Homo sapiens
agcaactgaartgggtatatg

SEQ ID NO: 13017 - DNA, 21 bp, Homo sapiens
aaaggcaactrtattcatacc

SEQ ID NO: 13018 - DNA, 21 bp, Homo sapiens
gacacatcggraactgtgtag

SEQ ID NO: 13019 - DNA, 21 bp, Homo sapiens
attcagttttyaaaaccttac

SEQ ID NO: 13020 - DNA, 21 bp, Homo sapiens
gcaaggatgcyaatctgtaac

SEQ ID NO: 13021 - DNA, 21 bp, Homo sapiens
aatagttcaamctacttagac

SEQ ID NO: 13022 - DNA, 21 bp, Homo sapiens
aacagagaccytagagagctg

SEQ ID NO: 13023 - DNA, 21 bp, Homo sapiens
tattactgctrtagatcataa

SEQ ID NO: 13024 - DNA, 21 bp, Homo sapiens
ccttcgtatgyctagaaagcc

SEQ ID NO: 13025 - DNA, 21 bp, Homo sapiens
aaacacagagraagatataaa

SEQ ID NO: 13026 - DNA, 21 bp, Homo sapiens
gattgttgagkccattggaag

SEQ ID NO: 13027 - DNA, 21 bp, Homo sapiens
aatctctggcrtccactaatc

SEQ ID NO: 13028 - DNA, 21 bp, Homo sapiens
catcctcgtakctgaatctcc

SEQ ID NO: 13029 - DNA, 21 bp, Homo sapiens
agtattccatygaatacttat

SEQ ID NO: 13030 - DNA, 21 bp, Homo sapiens
ctccctccccmaaatactgtc

SEQ ID NO: 13031 - DNA, 21 bp, Homo sapiens
gatttttttcrcctgttaata

SEQ ID NO: 13032 - DNA, 21 bp, Homo sapiens
atattttcctrtagttgaagg

SEQ ID NO: 13033 - DNA, 21 bp, Homo sapiens
tagtggtgggygcggtgactg

SEQ ID NO: 13034 - DNA, 21 bp, Homo sapiens
gcaaatgtaamaattccacat

SEQ ID NO: 13035 - DNA, 21 bp, Homo sapiens
gggaaatgaayaagatactgc

SEQ ID NO: 13036 - DNA, 21 bp, Homo sapiens
agggatagttkcaccagatct

SEQ ID NO: 13037 - DNA, 21 bp, Homo sapiens
aacatcactgrcctctcccaa

SEQ ID NO: 13038 - DNA, 21 bp, Homo sapiens
cataggatttrtaattactaa

SEQ ID NO: 13039 - DNA, 21 bp, Homo sapiens
catgcctcttrtgtgggaaag

SEQ ID NO: 13040 - DNA, 21 bp, Homo sapiens
ataaactctcyggaacatcca

SEQ ID NO: 13041 - DNA, 21 bp, Homo sapiens
tatcttctggrgtgaatgata

SEQ ID NO: 13042 - DNA, 21 bp, Homo sapiens
atggcaatgcrtactctggag

SEQ ID NO: 13043 - DNA, 21 bp, Homo sapiens
ctttttaaaaygtcattcaag

SEQ ID NO: 13044 - DNA, 21 bp, Homo sapiens
aggatcagcgrcccagagata

SEQ ID NO: 13045 - DNA, 21 bp, Homo sapiens
gatttatctarggtccccagc

SEQ ID NO: 13046 - DNA, 21 bp, Homo sapiens
tttatctctcygaggcttgga

SEQ ID NO: 13047 - DNA, 21 bp, Homo sapiens
ataagccaccyactgtggtac

SEQ ID NO: 13048 - DNA, 21 bp, Homo sapiens
agtggtgtgayctcagaaaac

SEQ ID NO: 13049 - DNA, 21 bp, Homo sapiens
tttcattcacrttgctggaaa

SEQ ID NO: 13050 - DNA, 21 bp, Homo sapiens
taagcctttarctccttttga

SEQ ID NO: 13051 - DNA, 21 bp, Homo sapiens
ctatcttccarttaagtcctg

SEQ ID NO: 13052 - DNA, 21 bp, Homo sapiens
gaacacagatragactcttag

SEQ ID NO: 13053 - DNA, 21 bp, Homo sapiens
ccctgttaccrgtgatgggtt

SEQ ID NO: 13054 - DNA, 21 bp, Homo sapiens
actgaatgacrgggcacagga

SEQ ID NO: 13055 - DNA, 21 bp, Homo sapiens
ccaacctgctyagttgccggc

SEQ ID NO: 13056 - DNA, 21 bp, Homo sapiens
agagatgcagraagccaaggc

SEQ ID NO: 13057 - DNA, 21 bp, Homo sapiens
ggagaagtcartgtctaactt

SEQ ID NO: 13058 - DNA, 21 bp, Homo sapiens
cttccaatcgktatgttagta

SEQ ID NO: 13059 - DNA, 21 bp, Homo sapiens
caggggaagcyggattagagg

SEQ ID NO: 13060 - DNA, 21 bp, Homo sapiens
ctctgccctgkgccctgtgca

SEQ ID NO: 13061 - DNA, 21 bp, Homo sapiens
ctgtatccaayagtcattgtg

SEQ ID NO: 13062 - DNA, 21 bp, Homo sapiens
ttgctgaaatytactttgtct

SEQ ID NO: 13063 - DNA, 21 bp, Homo sapiens
atgtaaacaaytgatgatgac

SEQ ID NO: 13064 - DNA, 21 bp, Homo sapiens
tcagttagcayagccagggga

SEQ ID NO: 13065 - DNA, 21 bp, Homo sapiens
tgggtgacttmagcttcatcc

SEQ ID NO: 13066 - DNA, 21 bp, Homo sapiens
cacactctagktgcagaaaca

SEQ ID NO: 13067 - DNA, 21 bp, Homo sapiens
caaatagtcarttatattttg

SEQ ID NO: 13068 - DNA, 21 bp, Homo sapiens
gagggagcaamaatgagacca

SEQ ID NO: 13069 - DNA, 21 bp, Homo sapiens
cccctaagatygcaactattg

SEQ ID NO: 13070 - DNA, 21 bp, Homo sapiens
ctgctgaagcyatctgggctt

SEQ ID NO: 13071 - DNA, 21 bp, Homo sapiens
tgtggtcagayaatatatgcc

SEQ ID NO: 13072 - DNA, 21 bp, Homo sapiens
cctaggcctcycaaaggccct

SEQ ID NO: 13073 - DNA, 21 bp, Homo sapiens
ttcaaagacaytcaggttgtg

SEQ ID NO: 13074 - DNA, 21 bp, Homo sapiens
ctgcatattcmgttgctgcca

SEQ ID NO: 13075 - DNA, 21 bp, Homo sapiens
ctagaaggatycccaccctgt

SEQ ID NO: 13076 - DNA, 21 bp, Homo sapiens
gtcatcttcaytgatgaattg

SEQ ID NO: 13077 - DNA, 21 bp, Homo sapiens
aggagaaccargaggctttca

SEQ ID NO: 13078 - DNA, 21 bp, Homo sapiens
cctccatcacragccgagcag

SEQ ID NO: 13079 - DNA, 21 bp, Homo sapiens
taagtttccartttttgctca

SEQ ID NO: 13080 - DNA, 21 bp, Homo sapiens
acatctttatrtttccctgat

SEQ ID NO: 13081 - DNA, 21 bp, Homo sapiens
ccttaacctcrgagcttctac

SEQ ID NO: 13082 - DNA, 21 bp, Homo sapiens
agaaaagaaaygtttgacacc

SEQ ID NO: 13083 - DNA, 21 bp, Homo sapiens
ggaagtgttayagaattctca

SEQ ID NO: 13084 - DNA, 21 bp, Homo sapiens
gatgaaaaaamaattcctggg

SEQ ID NO: 13085 - DNA, 21 bp, Homo sapiens
ctttccttggytaacttcttc

SEQ ID NO: 13086 - DNA, 21 bp, Homo sapiens
cattttattgycactctttgg

SEQ ID NO: 13087 - DNA, 21 bp, Homo sapiens
gaagcactgcycttgtgctct

SEQ ID NO: 13088 - DNA, 21 bp, Homo sapiens
ctattcatctrtcatttatct

SEQ ID NO: 13089 - DNA, 21 bp, Homo sapiens
ctctaacaggrgaatccagaa

SEQ ID NO: 13090 - DNA, 21 bp, Homo sapiens
ttcttgtttcratgtgaaata

SEQ ID NO: 13091 - DNA, 21 bp, Homo sapiens
aatctggatcrtttaaatttg

SEQ ID NO: 13092 - DNA, 21 bp, Homo sapiens
catgatgccgraagttgcagt

SEQ ID NO: 13093 - DNA, 21 bp, Homo sapiens
aattgaatttmcttttgtgtc

SEQ ID NO: 13094 - DNA, 21 bp, Homo sapiens
actgaggctgygccttgacca

SEQ ID NO: 13095 - DNA, 21 bp, Homo sapiens
gagataggttkataaagagat

SEQ ID NO: 13096 - DNA, 21 bp, Homo sapiens
tcaccccaccrtgccctttac

SEQ ID NO: 13097 - DNA, 21 bp, Homo sapiens
gtagaagctaygagggttctt

SEQ ID NO: 13098 - DNA, 21 bp, Homo sapiens
tacctgtcttrtggcccccca

SEQ ID NO: 13099 - DNA, 21 bp, Homo sapiens
gggagctgtcraagaggcaat

SEQ ID NO: 13100 - DNA, 21 bp, Homo sapiens
cataacaactrgattcattgg

SEQ ID NO: 13101 - DNA, 21 bp, Homo sapiens
aatgccttctmtattctttca

SEQ ID NO: 13102 - DNA, 21 bp, Homo sapiens
tgcctcaagtrcttctctgtg

SEQ ID NO: 13103 - DNA, 21 bp, Homo sapiens
tactcttaacyactatcatat

SEQ ID NO: 13104 - DNA, 21 bp, Homo sapiens
taaaacatgcraggtaccacc

SEQ ID NO: 13105 - DNA, 21 bp, Homo sapiens
gccaagctccytaagagttct

SEQ ID NO: 13106 - DNA, 21 bp, Homo sapiens
tactgtaagaytctgggaatt

SEQ ID NO: 13107 - DNA, 21 bp, Homo sapiens
accttgttaayggctgcaggg

SEQ ID NO: 13108 - DNA, 21 bp, Homo sapiens
tgtgatgagcrtggggtcact

SEQ ID NO: 13109 - DNA, 21 bp, Homo sapiens
tgtgctgctgrcctcagaagg

SEQ ID NO: 13110 - DNA, 21 bp, Homo sapiens
tgtatcactgrcccgtgtatc

SEQ ID NO: 13111 - DNA, 21 bp, Homo sapiens
gtatcctgccmccctcagctt

SEQ ID NO: 13112 - DNA, 21 bp, Homo sapiens
ggttctggttytgactctgat

SEQ ID NO: 13113 - DNA, 21 bp, Homo sapiens
atgagtggtartaagttcagc

SEQ ID NO: 13114 - DNA, 21 bp, Homo sapiens
gttgtgacacrtcccatcctt

SEQ ID NO: 13115 - DNA, 21 bp, Homo sapiens
tggacttctcyctccagccaa

SEQ ID NO: 13116 - DNA, 21 bp, Homo sapiens
ggttgagacayctgctcaaac

SEQ ID NO: 13117 - DNA, 21 bp, Homo sapiens
ttagttatcaytttcctccta

SEQ ID NO: 13118 - DNA, 21 bp, Homo sapiens
tgggaagagtycactctagct

SEQ ID NO: 13119 - DNA, 21 bp, Homo sapiens
actcgttaggrtatgtattat

SEQ ID NO: 13120 - DNA, 21 bp, Homo sapiens
ctttgtactgrgtaagaatag

SEQ ID NO: 13121 - DNA, 21 bp, Homo sapiens
ggcttcatctrcacactaaac

SEQ ID NO: 13122 - DNA, 21 bp, Homo sapiens
aagaaaatacyggattcagtt

SEQ ID NO: 13123 - DNA, 21 bp, Homo sapiens
ctacaacttcrccatttccaa

SEQ ID NO: 13124 - DNA, 21 bp, Homo sapiens
catctctcttragcttccagt

SEQ ID NO: 13125 - DNA, 21 bp, Homo sapiens
tggatatccckttgaccgagc

SEQ ID NO: 13126 - DNA, 21 bp, Homo sapiens
agactggccaycttgttgtcc

SEQ ID NO: 13127 - DNA, 21 bp, Homo sapiens
cctaaaaatgygaactcgtta

SEQ ID NO: 13128 - DNA, 21 bp, Homo sapiens
gaatccttgcrgcttccttgt

SEQ ID NO: 13129 - DNA, 21 bp, Homo sapiens
acagcttctayctaaggctgg

SEQ ID NO: 13130 - DNA, 21 bp, Homo sapiens
acataatcttracgagttttt

SEQ ID NO: 13131 - DNA, 21 bp, Homo sapiens
aggagtatttrgcccatcctg

SEQ ID NO: 13132 - DNA, 21 bp, Homo sapiens
aaaaatcagtrtaatctatgt

SEQ ID NO: 13133 - DNA, 21 bp, Homo sapiens
tagttaaatcmttttaaaaca

SEQ ID NO: 13134 - DNA, 21 bp, Homo sapiens
gggatctagcraagtcccaca

SEQ ID NO: 13135 - DNA, 21 bp, Homo sapiens
cttccgaagcrttcttctatt

SEQ ID NO: 13136 - DNA, 21 bp, Homo sapiens
acaccaaatcrataaaatacc

SEQ ID NO: 13137 - DNA, 21 bp, Homo sapiens
gcctttttagyaaggaagaaa

SEQ ID NO: 13138 - DNA, 21 bp, Homo sapiens
ttatctgtccraccacactgt

SEQ ID NO: 13139 - DNA, 21 bp, Homo sapiens
caaggcaacaygcatgaggac

SEQ ID NO: 13140 - DNA, 21 bp, Homo sapiens
agagaaactaracatagcact

SEQ ID NO: 13141 - DNA, 21 bp, Homo sapiens
cacacggcatmtcatatacca

SEQ ID NO: 13142 - DNA, 21 bp, Homo sapiens
ccctgcgcgcyggctgccgcc

SEQ ID NO: 13143 - DNA, 21 bp, Homo sapiens
tccatcctgtkggttccattt

SEQ ID NO: 13144 - DNA, 21 bp, Homo sapiens
tatctatagcrttgaaaacac

SEQ ID NO: 13145 - DNA, 21 bp, Homo sapiens
acatcatcctyttatattgtg

SEQ ID NO: 13146 - DNA, 21 bp, Homo sapiens
tgtcatctcaycacatagcgg

SEQ ID NO: 13147 - DNA, 21 bp, Homo sapiens
aaactaagagkggcaaataag

SEQ ID NO: 13148 - DNA, 21 bp, Homo sapiens
aattagttttrggttctgttg

SEQ ID NO: 13149 - DNA, 21 bp, Homo sapiens
atattgaaaayagactatagg

SEQ ID NO: 13150 - DNA, 21 bp, Homo sapiens
tggaatatggktgaaagatga

SEQ ID NO: 13151 - DNA, 21 bp, Homo sapiens
ctttggaagaraggtaagaaa

SEQ ID NO: 13152 - DNA, 21 bp, Homo sapiens
cccaagagacratgaagatat

SEQ ID NO: 13153 - DNA, 21 bp, Homo sapiens
atttttctgayaacaaaaata

SEQ ID NO: 13154 - DNA, 21 bp, Homo sapiens
aacatctcccragagtggtta

SEQ ID NO: 13155 - DNA, 21 bp, Homo sapiens
cacctgtggtrgtctgtagtt

SEQ ID NO: 13156 - DNA, 21 bp, Homo sapiens
acattaatttrggggcttttt

SEQ ID NO: 13157 - DNA, 21 bp, Homo sapiens
ttagagcactygttactgggg

SEQ ID NO: 13158 - DNA, 21 bp, Homo sapiens
ttaccaggatrgactgggaaa

SEQ ID NO: 13159 - DNA, 21 bp, Homo sapiens
gtgtactataygtgttaaata

SEQ ID NO: 13160 - DNA, 21 bp, Homo sapiens
gaaaaaaaaaytcgttcatag

SEQ ID NO: 13161 - DNA, 21 bp, Homo sapiens
ataagggatcytgggcctgag

SEQ ID NO: 13162 - DNA, 21 bp, Homo sapiens
atataccacgrccagcagaat

SEQ ID NO: 13163 - DNA, 21 bp, Homo sapiens
aacttttgagyaaaatcttag

SEQ ID NO: 13164 - DNA, 21 bp, Homo sapiens
atctgtgagcmaatcaaaata

SEQ ID NO: 13165 - DNA, 21 bp, Homo sapiens
ggcaatgtgtrgcacacaatt

SEQ ID NO: 13166 - DNA, 21 bp, Homo sapiens
caaaacaacarctaccataaa

SEQ ID NO: 13167 - DNA, 21 bp, Homo sapiens
gagcccatcaragaatgaata

SEQ ID NO: 13168 - DNA, 21 bp, Homo sapiens
cctctattttkggaatacagt

SEQ ID NO: 13169 - DNA, 21 bp, Homo sapiens
tgtctctgtcrttcatggctt

SEQ ID NO: 13170 - DNA, 21 bp, Homo sapiens
cataggctgartttagtctgg

SEQ ID NO: 13171 - DNA, 21 bp, Homo sapiens
ttgattacagmtagcctatat

SEQ ID NO: 13172 - DNA, 21 bp, Homo sapiens
atttgttagcmatggtaattc

SEQ ID NO: 13173 - DNA, 21 bp, Homo sapiens
tcacctgttaygacacctgta

SEQ ID NO: 13174 - DNA, 21 bp, Homo sapiens
ctgctttgttrtgactagagc

SEQ ID NO: 13175 - DNA, 21 bp, Homo sapiens
taacatgaggyatatggaaga

SEQ ID NO: 13176 - DNA, 21 bp, Homo sapiens
gcatggaaaartggattcttc

SEQ ID NO: 13177 - DNA, 21 bp, Homo sapiens
tggtaaaacartgagacagta

SEQ ID NO: 13178 - DNA, 21 bp, Homo sapiens
tgactatttayagaaattaca

SEQ ID NO: 13179 - DNA, 21 bp, Homo sapiens
aaaaaaaaacmtgatgtacaa

SEQ ID NO: 13180 - DNA, 21 bp, Homo sapiens
tatatgatagkagtccctctc

SEQ ID NO: 13181 - DNA, 21 bp, Homo sapiens
tagggagcctkgccaatggga

SEQ ID NO: 13182 - DNA, 21 bp, Homo sapiens
gagaaagctgyatggcctgca

SEQ ID NO: 13183 - DNA, 21 bp, Homo sapiens
atacaaaatayttagcacata

SEQ ID NO: 13184 - DNA, 21 bp, Homo sapiens
ttccagcactygctagacatg

SEQ ID NO: 13185 - DNA, 21 bp, Homo sapiens
gagctaactayaaatgttctt

SEQ ID NO: 13186 - DNA, 21 bp, Homo sapiens
aactctctttkgtgttacatc

SEQ ID NO: 13187 - DNA, 21 bp, Homo sapiens
taaaaatgatmatgaggccag

SEQ ID NO: 13188 - DNA, 21 bp, Homo sapiens
ttacttgaacrattatcaaca

SEQ ID NO: 13189 - DNA, 21 bp, Homo sapiens
gactttattayagataaacaa

SEQ ID NO: 13190 - DNA, 21 bp, Homo sapiens
agaagtaactytggctaccac

SEQ ID NO: 13191 - DNA, 21 bp, Homo sapiens
gaaaataccaytgggcagagc

SEQ ID NO: 13192 - DNA, 21 bp, Homo sapiens
ggtgttccaargcttctggca

SEQ ID NO: 13193 - DNA, 21 bp, Homo sapiens
ttctttctcamatttctcaac

SEQ ID NO: 13194 - DNA, 21 bp, Homo sapiens
accttttgcgratctttgtct

SEQ ID NO: 13195 - DNA, 21 bp, Homo sapiens
catcagactcyattaacactg

SEQ ID NO: 13196 - DNA, 21 bp, Homo sapiens
gaacatttgcyggctgtttca

SEQ ID NO: 13197 - DNA, 21 bp, Homo sapiens
ttttctgatcracatggaatg

SEQ ID NO: 13198 - DNA, 21 bp, Homo sapiens
actccagcacrccctaacgag

SEQ ID NO: 13199 - DNA, 21 bp, Homo sapiens
aaattccaccrggaaattcac

SEQ ID NO: 13200 - DNA, 21 bp, Homo sapiens
tcttcccaccyggcagtggcc

SEQ ID NO: 13201 - DNA, 21 bp, Homo sapiens
ggctcctttcrctaagaagta

SEQ ID NO: 13202 - DNA, 21 bp, Homo sapiens
gactttgtcayggaatctgta

SEQ ID NO: 13203 - DNA, 21 bp, Homo sapiens
aggtttttcaytgggaatcca

SEQ ID NO: 13204 - DNA, 21 bp, Homo sapiens
ccagaatgtaycttcattcta

SEQ ID NO: 13205 - DNA, 21 bp, Homo sapiens
agctagaaccrgatgtgagat

SEQ ID NO: 13206 - DNA, 21 bp, Homo sapiens
tttatttgggmaagttaatta

SEQ ID NO: 13207 - DNA, 21 bp, Homo sapiens
ctcctaagctrggcatggagt

SEQ ID NO: 13208 - DNA, 21 bp, Homo sapiens
gtaacagacckatcacagagc

SEQ ID NO: 13209 - DNA, 21 bp, Homo sapiens
aagtgtagaarttagagtcca

SEQ ID NO: 13210 - DNA, 21 bp, Homo sapiens
gaggctgcccygtccttcact

SEQ ID NO: 13211 - DNA, 21 bp, Homo sapiens
aggtaggttgrgacagtcttt

SEQ ID NO: 13212 - DNA, 21 bp, Homo sapiens
aggaggccacrttatccaagg

SEQ ID NO: 13213 - DNA, 21 bp, Homo sapiens
ctcaacaaacrgaagagaagc

SEQ ID NO: 13214 - DNA, 21 bp, Homo sapiens
tctatatgtcmagcaactcac

SEQ ID NO: 13215 - DNA, 21 bp, Homo sapiens
tgagtcaagartttgacaaac

SEQ ID NO: 13216 - DNA, 21 bp, Homo sapiens
aagttgtttgygctggattag

SEQ ID NO: 13217 - DNA, 21 bp, Homo sapiens
ctgtgtccccrttttaaccca

SEQ ID NO: 13218 - DNA, 21 bp, Homo sapiens
caatcacacaktgttgtatat

SEQ ID NO: 13219 - DNA, 21 bp, Homo sapiens
ttgactagcargggtaagaat

SEQ ID NO: 13220 - DNA, 21 bp, Homo sapiens
tacattgtatrgggatgtgtg

SEQ ID NO: 13221 - DNA, 21 bp, Homo sapiens
ggaaatgacarattgagaagg

SEQ ID NO: 13222 - DNA, 21 bp, Homo sapiens
tatgaagcacrtttaaagaag

SEQ ID NO: 13223 - DNA, 21 bp, Homo sapiens
tttgctgaacycatggaatgt

SEQ ID NO: 13224 - DNA, 21 bp, Homo sapiens
ttgtgtaagcygtcctttcct

SEQ ID NO: 13225 - DNA, 21 bp, Homo sapiens
ctgaccaaccrgtaagcaacc

SEQ ID NO: 13226 - DNA, 21 bp, Homo sapiens
aaatgaacacyatggaaaatg

SEQ ID NO: 13227 - DNA, 21 bp, Homo sapiens
agactcttccratgtttgaaa

SEQ ID NO: 13228 - DNA, 21 bp, Homo sapiens
tctaaggttgraaacagtgta

SEQ ID NO: 13229 - DNA, 21 bp, Homo sapiens
gagagtgttcrctttaaagat

SEQ ID NO: 13230 - DNA, 21 bp, Homo sapiens
gactgagacckgctaacctat

SEQ ID NO: 13231 - DNA, 21 bp, Homo sapiens
tagactcattmaagtttttct

SEQ ID NO: 13232 - DNA, 21 bp, Homo sapiens
aattcttattytttctttttc

SEQ ID NO: 13233 - DNA, 21 bp, Homo sapiens
tattaagaacraaaaaggttg

SEQ ID NO: 13234 - DNA, 21 bp, Homo sapiens
ctaactttgcrtattcacttg

SEQ ID NO: 13235 - DNA, 21 bp, Homo sapiens
gacagcctccrttactcaggc

SEQ ID NO: 13236 - DNA, 21 bp, Homo sapiens
tttttcctgtyttctaaacta

SEQ ID NO: 13237 - DNA, 21 bp, Homo sapiens
aggagaatagrcatttttgaa

SEQ ID NO: 13238 - DNA, 21 bp, Homo sapiens
aaacatgatgytgtacacctt

SEQ ID NO: 13239 - DNA, 21 bp, Homo sapiens
aatttgccaayccaaagaaac

SEQ ID NO: 13240 - DNA, 21 bp, Homo sapiens
gaaagacttcyacgaggagaa

SEQ ID NO: 13241 - DNA, 21 bp, Homo sapiens
ttaacaaaaamtaaccaatca

SEQ ID NO: 13242 - DNA, 21 bp, Homo sapiens
agagtataccyagcattgaaa

SEQ ID NO: 13243 - DNA, 21 bp, Homo sapiens
aagagtcattyggtatttgca

SEQ ID NO: 13244 - DNA, 21 bp, Homo sapiens
gaggcaccctrcagaagcatc

SEQ ID NO: 13245 - DNA, 21 bp, Homo sapiens
aaatgtgtacktgttgattgc

SEQ ID NO: 13246 - DNA, 21 bp, Homo sapiens
atcttgttatrttacatcttg

SEQ ID NO: 13247 - DNA, 21 bp, Homo sapiens
tgaaactctgmgctgtgagga

SEQ ID NO: 13248 - DNA, 21 bp, Homo sapiens
ctaagctctcmgagttaaaat

SEQ ID NO: 13249 - DNA, 21 bp, Homo sapiens
tagaaatcccyagaaatcaac

SEQ ID NO: 13250 - DNA, 21 bp, Homo sapiens
tgtgaaccacrtacccaatca

SEQ ID NO: 13251 - DNA, 21 bp, Homo sapiens
gaattcacttktgagtactgt

SEQ ID NO: 13252 - DNA, 21 bp, Homo sapiens
aattctgcccraacacaaggg

SEQ ID NO: 13253 - DNA, 21 bp, Homo sapiens
ctttaactatrgggaaggaaa

SEQ ID NO: 13254 - DNA, 21 bp, Homo sapiens
tgtgcacaagrtgttaattgt

SEQ ID NO: 13255 - DNA, 21 bp, Homo sapiens
tcatatcattkgtttggagaa

SEQ ID NO: 13256 - DNA, 21 bp, Homo sapiens
gtacctaccamagtagttaac

SEQ ID NO: 13257 - DNA, 21 bp, Homo sapiens
tgggtttcatraaagtcttca

SEQ ID NO: 13258 - DNA, 21 bp, Homo sapiens
tgtttaccccmaaaaagcatt

SEQ ID NO: 13259 - DNA, 21 bp, Homo sapiens
gtccttggctmaccctccaca

SEQ ID NO: 13260 - DNA, 21 bp, Homo sapiens
ggaatgggcarccatgcagca

SEQ ID NO: 13261 - DNA, 21 bp, Homo sapiens
ttactgtgccrtggttcttgc

SEQ ID NO: 13262 - DNA, 21 bp, Homo sapiens
ccatcattccraagttcttac

SEQ ID NO: 13263 - DNA, 21 bp, Homo sapiens
ttatcaccgcyctcttcctct

SEQ ID NO: 13264 - DNA, 21 bp, Homo sapiens
tcaccaccatrggtgttaaaa

SEQ ID NO: 13265 - DNA, 21 bp, Homo sapiens
tcaagaagtargcaggtaaag

SEQ ID NO: 13266 - DNA, 21 bp, Homo sapiens
atagttacttrctggcccagc

SEQ ID NO: 13267 - DNA, 21 bp, Homo sapiens
tatgctactcrtagtgatttc

SEQ ID NO: 13268 - DNA, 21 bp, Homo sapiens
tcctgaaggaytgatcagaat

SEQ ID NO: 13269 - DNA, 21 bp, Homo sapiens
aacagaaaaaktccaagtctt

SEQ ID NO: 13270 - DNA, 21 bp, Homo sapiens
tggttcatagycttctcatct

SEQ ID NO: 13271 - DNA, 21 bp, Homo sapiens
ttaatgatacrtcttatttct

SEQ ID NO: 13272 - DNA, 21 bp, Homo sapiens
tccatgctggrgagtactttc

SEQ ID NO: 13273 - DNA, 21 bp, Homo sapiens
ttagattaagrtggatttagc

SEQ ID NO: 13274 - DNA, 21 bp, Homo sapiens
gttgaagacarggaggtaatt

SEQ ID NO: 13275 - DNA, 21 bp, Homo sapiens
acaaccagagmtttctttgct

SEQ ID NO: 13276 - DNA, 21 bp, Homo sapiens
attgtgggggkttttggtttt

SEQ ID NO: 13277 - DNA, 21 bp, Homo sapiens
gttttcaattyccatcccagt

SEQ ID NO: 13278 - DNA, 21 bp, Homo sapiens
tgccagttttrctactttcca

SEQ ID NO: 13279 - DNA, 21 bp, Homo sapiens
tgtatggcacrcactgtaact

SEQ ID NO: 13280 - DNA, 21 bp, Homo sapiens
tgggtagaggrtctcacatgt

SEQ ID NO: 13281 - DNA, 21 bp, Homo sapiens
tgccctagccyatccttatct

SEQ ID NO: 13282 - DNA, 21 bp, Homo sapiens
atgaaagataytttgtatgac

SEQ ID NO: 13283 - DNA, 21 bp, Homo sapiens
atagcaaaagrctatgagatt

SEQ ID NO: 13284 - DNA, 21 bp, Homo sapiens
tccagaaaagrctggacttaa

SEQ ID NO: 13285 - DNA, 21 bp, Homo sapiens
ctttcaccatrtgcaaaagtt

SEQ ID NO: 13286 - DNA, 21 bp, Homo sapiens
cggtcattackagatagcatt

SEQ ID NO: 13287 - DNA, 21 bp, Homo sapiens
atgcttggttktcagggggca

SEQ ID NO: 13288 - DNA, 21 bp, Homo sapiens
ggattgtgaaktcttctttct

SEQ ID NO: 13289 - DNA, 21 bp, Homo sapiens
attccaccttyagcagaagtt

SEQ ID NO: 13290 - DNA, 21 bp, Homo sapiens
attgtttctgkgactgagtca

SEQ ID NO: 13291 - DNA, 21 bp, Homo sapiens
ataccagttgrcaattaagct

SEQ ID NO: 13292 - DNA, 21 bp, Homo sapiens
aaagaaaaagycagtattgag

SEQ ID NO: 13293 - DNA, 21 bp, Homo sapiens
acatgatcatrtatccattga

SEQ ID NO: 13294 - DNA, 21 bp, Homo sapiens
ctgaagttctyatcactcctg

SEQ ID NO: 13295 - DNA, 21 bp, Homo sapiens
caattcctttrtattggtttt

SEQ ID NO: 13296 - DNA, 21 bp, Homo sapiens
agacagtcttktacttggcat

SEQ ID NO: 13297 - DNA, 21 bp, Homo sapiens
tgtatgacaarcttgttgtac

SEQ ID NO: 13298 - DNA, 21 bp, Homo sapiens
acaggactttraacacttcat

SEQ ID NO: 13299 - DNA, 21 bp, Homo sapiens
cagagtgcatkgtaccatacc

SEQ ID NO: 13300 - DNA, 21 bp, Homo sapiens
aaccttgagtratagttgaat

SEQ ID NO: 13301 - DNA, 21 bp, Homo sapiens
aagatgcaagyccaagactca

SEQ ID NO: 13302 - DNA, 21 bp, Homo sapiens
ttctagtcacyggcacttgac

SEQ ID NO: 13303 - DNA, 21 bp, Homo sapiens
caagaataaaracgcagttag

SEQ ID NO: 13304 - DNA, 21 bp, Homo sapiens
taaatcagttyacgatatcaa

SEQ ID NO: 13305 - DNA, 21 bp, Homo sapiens
tgataaatatygtcacattgt

SEQ ID NO: 13306 - DNA, 21 bp, Homo sapiens
cagaaccacaygtacatttct

SEQ ID NO: 13307 - DNA, 21 bp, Homo sapiens
tggatgttttmtttctctatt

SEQ ID NO: 13308 - DNA, 21 bp, Homo sapiens
tgaagttcttrttaattacca

SEQ ID NO: 13309 - DNA, 21 bp, Homo sapiens
ctccggagaartaaggaagaa

SEQ ID NO: 13310 - DNA, 21 bp, Homo sapiens
aaaatgagaaragggacaatt

SEQ ID NO: 13311 - DNA, 21 bp, Homo sapiens
gcatttctgartgagccaatt

SEQ ID NO: 13312 - DNA, 21 bp, Homo sapiens
ggggagctatkcagcatttag

SEQ ID NO: 13313 - DNA, 21 bp, Homo sapiens
cacttggtagmagtttagtct

SEQ ID NO: 13314 - DNA, 21 bp, Homo sapiens
tgcacaccttrtatgattgca

SEQ ID NO: 13315 - DNA, 21 bp, Homo sapiens
ggaattgaagraaagttctag

SEQ ID NO: 13316 - DNA, 21 bp, Homo sapiens
aaagagccagygcagttcagt

SEQ ID NO: 13317 - DNA, 21 bp, Homo sapiens
agcttaatgckgctttcttca

SEQ ID NO: 13318 - DNA, 21 bp, Homo sapiens
ataggctatgkatttggacac

SEQ ID NO: 13319 - DNA, 21 bp, Homo sapiens
caaatgttttrcctatgatgt

SEQ ID NO: 13320 - DNA, 21 bp, Homo sapiens
cagttctctaytcacttccat

SEQ ID NO: 13321 - DNA, 21 bp, Homo sapiens
attaacagatrggaagttctg

SEQ ID NO: 13322 - DNA, 21 bp, Homo sapiens
tcactaatctraaaaggcagt

SEQ ID NO: 13323 - DNA, 21 bp, Homo sapiens
gatcttctacraagcagacca

SEQ ID NO: 13324 - DNA, 21 bp, Homo sapiens
cccttggctgrtattttatct

SEQ ID NO: 13325 - DNA, 21 bp, Homo sapiens
taaatggcagkttcttttaac

SEQ ID NO: 13326 - DNA, 21 bp, Homo sapiens
gatatagctarcattgttttt

SEQ ID NO: 13327 - DNA, 21 bp, Homo sapiens
ttccacttagrttcttatgta

SEQ ID NO: 13328 - DNA, 21 bp, Homo sapiens
gcaaaagtccyacaagtgtca

SEQ ID NO: 13329 - DNA, 21 bp, Homo sapiens
acgcactctcrtttcagttct

SEQ ID NO: 13330 - DNA, 21 bp, Homo sapiens
caaaatctttmgtgacttttt

SEQ ID NO: 13331 - DNA, 21 bp, Homo sapiens
tttattcataraaacattggc

SEQ ID NO: 13332 - DNA, 21 bp, Homo sapiens
ttttcaagggyggatgtgtgt

SEQ ID NO: 13333 - DNA, 21 bp, Homo sapiens
ttatctacaartgtcatatat

SEQ ID NO: 13334 - DNA, 21 bp, Homo sapiens
tgagcttcacyctcattagtt

SEQ ID NO: 13335 - DNA, 21 bp, Homo sapiens
tgatgaagatmtcattaacac

SEQ ID NO: 13336 - DNA, 21 bp, Homo sapiens
ctaattttatygaatttcaat

SEQ ID NO: 13337 - DNA, 21 bp, Homo sapiens
ctttgcacagrgaagcacata

SEQ ID NO: 13338 - DNA, 21 bp, Homo sapiens
tttatacaaakaacagaaaca

SEQ ID NO: 13339 - DNA, 21 bp, Homo sapiens
gtttatattcyggacaagaca

SEQ ID NO: 13340 - DNA, 21 bp, Homo sapiens
ccatatagaayggtcaatgcc

SEQ ID NO: 13341 - DNA, 21 bp, Homo sapiens
cagcttccacraaaaaaaaaa

SEQ ID NO: 13342 - DNA, 21 bp, Homo sapiens
acagttttacmctcctaaaat

SEQ ID NO: 13343 - DNA, 21 bp, Homo sapiens
ggtgttacatyaagaaaaaca

SEQ ID NO: 13344 - DNA, 21 bp, Homo sapiens
aaagtcacagrtccaggaagt

SEQ ID NO: 13345 - DNA, 21 bp, Homo sapiens
ttttatattartaacaatctt

SEQ ID NO: 13346 - DNA, 21 bp, Homo sapiens
catgtaccaarcctgcatatg

SEQ ID NO: 13347 - DNA, 21 bp, Homo sapiens
aagtgtcttgratgctttgct

SEQ ID NO: 13348 - DNA, 21 bp, Homo sapiens
agcaaaacttyatggccaact

SEQ ID NO: 13349 - DNA, 21 bp, Homo sapiens
ttcctcgtttyaggagagtag

SEQ ID NO: 13350 - DNA, 21 bp, Homo sapiens
taaattgattmtatttgcaac

SEQ ID NO: 13351 - DNA, 21 bp, Homo sapiens
catagtcttayagcaattaat

SEQ ID NO: 13352 - DNA, 21 bp, Homo sapiens
agggaaaccamaatgcacact

SEQ ID NO: 13353 - DNA, 21 bp, Homo sapiens
gatttggcacrtgtccccact

SEQ ID NO: 13354 - DNA, 21 bp, Homo sapiens
gctggttattktttttgcttg

SEQ ID NO: 13355 - DNA, 21 bp, Homo sapiens
atatatgccayaaactctcta

SEQ ID NO: 13356 - DNA, 21 bp, Homo sapiens
cacctctataygctgaagact

SEQ ID NO: 13357 - DNA, 21 bp, Homo sapiens
tagggtttctyatgatgatgt

SEQ ID NO: 13358 - DNA, 21 bp, Homo sapiens
agcctttctaygcactctgaa

SEQ ID NO: 13359 - DNA, 21 bp, Homo sapiens
aaaatcaaagrtaaaaaaaaa

SEQ ID NO: 13360 - DNA, 21 bp, Homo sapiens
aggtctgaagrgaggctagtc

SEQ ID NO: 13361 - DNA, 21 bp, Homo sapiens
caggctttccrtaaggtgctg

SEQ ID NO: 13362 - DNA, 21 bp, Homo sapiens
tttatattaarttgttcctct

SEQ ID NO: 13363 - DNA, 21 bp, Homo sapiens
aatcatatgtrtaagtttttg

SEQ ID NO: 13364 - DNA, 21 bp, Homo sapiens
gatggaacacraatgacagag

SEQ ID NO: 13365 - DNA, 21 bp, Homo sapiens
gcatgtaggaycgttaaaggt

SEQ ID NO: 13366 - DNA, 21 bp, Homo sapiens
tatactgctaygtagtggtac

SEQ ID NO: 13367 - DNA, 21 bp, Homo sapiens
aaaaacaatcrtcctattcac

SEQ ID NO: 13368 - DNA, 21 bp, Homo sapiens
tttcatgtggyacctgtggta

SEQ ID NO: 13369 - DNA, 21 bp, Homo sapiens
tgaatcactaragcaagaatc

SEQ ID NO: 13370 - DNA, 21 bp, Homo sapiens
gctactcaatmtacatccata

SEQ ID NO: 13371 - DNA, 21 bp, Homo sapiens
accttcctcarttaaaaacat

SEQ ID NO: 13372 - DNA, 21 bp, Homo sapiens
cagaccttccmaacaaggtaa

SEQ ID NO: 13373 - DNA, 21 bp, Homo sapiens
gcttagcaagmaactctcctt

SEQ ID NO: 13374 - DNA, 21 bp, Homo sapiens
ataaataaatyggaagaacaa

SEQ ID NO: 13375 - DNA, 21 bp, Homo sapiens
acatgaggaaratgggactcg

SEQ ID NO: 13376 - DNA, 21 bp, Homo sapiens
ccttagtttcyccaacctctt

SEQ ID NO: 13377 - DNA, 21 bp, Homo sapiens
tgggaaatgtrtaagaagatg

SEQ ID NO: 13378 - DNA, 21 bp, Homo sapiens
acgatgtactrtcactctccc

SEQ ID NO: 13379 - DNA, 21 bp, Homo sapiens
tgctccatggrttttagagga

SEQ ID NO: 13380 - DNA, 21 bp, Homo sapiens
attatcacttytcaatccgta

SEQ ID NO: 13381 - DNA, 21 bp, Homo sapiens
gggaaaatgaragacccacag

SEQ ID NO: 13382 - DNA, 21 bp, Homo sapiens
gaacttgaaaygttccaacac

SEQ ID NO: 13383 - DNA, 21 bp, Homo sapiens
cttgcttagcratttcagtta

SEQ ID NO: 13384 - DNA, 21 bp, Homo sapiens
tcatacctggyacacaataaa

SEQ ID NO: 13385 - DNA, 21 bp, Homo sapiens
attgatacagraaaacagtaa

SEQ ID NO: 13386 - DNA, 21 bp, Homo sapiens
ccactatcatyaacataatag

SEQ ID NO: 13387 - DNA, 21 bp, Homo sapiens
ctcaagttcakttaatgaaat

SEQ ID NO: 13388 - DNA, 21 bp, Homo sapiens
agagggaactrtaatctcgca

SEQ ID NO: 13389 - DNA, 21 bp, Homo sapiens
tcttccaggarttttatagct

SEQ ID NO: 13390 - DNA, 21 bp, Homo sapiens
tcctgaagagktttgaattca

SEQ ID NO: 13391 - DNA, 21 bp, Homo sapiens
gaaggtgagarataagtcttc

SEQ ID NO: 13392 - DNA, 21 bp, Homo sapiens
atacataaaamcagtgtagaa

SEQ ID NO: 13393 - DNA, 21 bp, Homo sapiens
ctaagagataygtcaacattt

SEQ ID NO: 13394 - DNA, 21 bp, Homo sapiens
tttttgaaccrcttgggacaa

SEQ ID NO: 13395 - DNA, 21 bp, Homo sapiens
ctgattctgtraaactcataa

SEQ ID NO: 13396 - DNA, 21 bp, Homo sapiens
aacggaaagtrtatcagtccc

SEQ ID NO: 13397 - DNA, 21 bp, Homo sapiens
taaaatggatkttggataggc

SEQ ID NO: 13398 - DNA, 21 bp, Homo sapiens
tcctacttgayagctactatt

SEQ ID NO: 13399 - DNA, 21 bp, Homo sapiens
ttgagaacacracagggagat

SEQ ID NO: 13400 - DNA, 21 bp, Homo sapiens
ataagatatayttatctcaat

SEQ ID NO: 13401 - DNA, 21 bp, Homo sapiens
ggcaaattatygtatcttgta

SEQ ID NO: 13402 - DNA, 21 bp, Homo sapiens
gggttagttgyaacaatggta

SEQ ID NO: 13403 - DNA, 21 bp, Homo sapiens
ttgaatagaartgttgacagt

SEQ ID NO: 13404 - DNA, 21 bp, Homo sapiens
ttggacagttktgctaagtat

SEQ ID NO: 13405 - DNA, 21 bp, Homo sapiens
tcattgtatcrtatacatcac

SEQ ID NO: 13406 - DNA, 21 bp, Homo sapiens
ttagatacggycatcagtgtg

SEQ ID NO: 13407 - DNA, 21 bp, Homo sapiens
atactactttkcacattcagc

SEQ ID NO: 13408 - DNA, 21 bp, Homo sapiens
gtggagtaggrgagttatttc

SEQ ID NO: 13409 - DNA, 21 bp, Homo sapiens
cagatccacartcccactcct

SEQ ID NO: 13410 - DNA, 21 bp, Homo sapiens
ttatatcatakttccttccat

SEQ ID NO: 13411 - DNA, 21 bp, Homo sapiens
agctggagggrtagcaggatc

SEQ ID NO: 13412 - DNA, 21 bp, Homo sapiens
caatttatgckcaagcttcca

SEQ ID NO: 13413 - DNA, 21 bp, Homo sapiens
tgtacgaatayatctggctat

SEQ ID NO: 13414 - DNA, 21 bp, Homo sapiens
ctttaaacacraagaaaatca

SEQ ID NO: 13415 - DNA, 21 bp, Homo sapiens
tcagataaaaracaaattaat

SEQ ID NO: 13416 - DNA, 21 bp, Homo sapiens
acctggagacrgaggaaagcc

SEQ ID NO: 13417 - DNA, 21 bp, Homo sapiens
cagatttgtcktcaggactgt

SEQ ID NO: 13418 - DNA, 21 bp, Homo sapiens
ttgttctttarggagtctatg

SEQ ID NO: 13419 - DNA, 21 bp, Homo sapiens
ttatgcatccrtaaatgtagc

SEQ ID NO: 13420 - DNA, 21 bp, Homo sapiens
cagtcctgatkagaagagtga

SEQ ID NO: 13421 - DNA, 21 bp, Homo sapiens
tcacctcactraaagtactgg

SEQ ID NO: 13422 - DNA, 21 bp, Homo sapiens
tatacaaagamgggagaagat

SEQ ID NO: 13423 - DNA, 21 bp, Homo sapiens
gggaacagtaycaataacatc

SEQ ID NO: 13424 - DNA, 21 bp, Homo sapiens
ctcctcccccytgtgaatgag

SEQ ID NO: 13425 - DNA, 21 bp, Homo sapiens
ttttgaaaatkggggatgcaa

SEQ ID NO: 13426 - DNA, 21 bp, Homo sapiens
ggtcattatcrgagtgaggtg

SEQ ID NO: 13427 - DNA, 21 bp, Homo sapiens
gattgataatrcaagtacctc

SEQ ID NO: 13428 - DNA, 21 bp, Homo sapiens
catcaatattrcactcaaacc

SEQ ID NO: 13429 - DNA, 21 bp, Homo sapiens
gcagtcatttyctgtaacagt

SEQ ID NO: 13430 - DNA, 21 bp, Homo sapiens
cttcctttatygttcagaatg

SEQ ID NO: 13431 - DNA, 21 bp, Homo sapiens
atcgttcagartgtccagagg

SEQ ID NO: 13432 - DNA, 21 bp, Homo sapiens
ttgagccaagktatctgctat

SEQ ID NO: 13433 - DNA, 21 bp, Homo sapiens
catatttaatyatttttatgt

SEQ ID NO: 13434 - DNA, 21 bp, Homo sapiens
ctcccttgatygtcccttcat

SEQ ID NO: 13435 - DNA, 21 bp, Homo sapiens
tcggcctaacktttgattttt

SEQ ID NO: 13436 - DNA, 21 bp, Homo sapiens
ttacattgtartgtaagcctt

SEQ ID NO: 13437 - DNA, 21 bp, Homo sapiens
atcacttagtrtaattcccaa

SEQ ID NO: 13438 - DNA, 21 bp, Homo sapiens
accaccctttygccatccatg

SEQ ID NO: 13439 - DNA, 21 bp, Homo sapiens
taattcttttyagatcattct

SEQ ID NO: 13440 - DNA, 21 bp, Homo sapiens
acaatacaccrtctgaaaatc

SEQ ID NO: 13441 - DNA, 21 bp, Homo sapiens
tctgcacacaygtaattggat

SEQ ID NO: 13442 - DNA, 21 bp, Homo sapiens
tttgctgttcyttctttctgg

SEQ ID NO: 13443 - DNA, 21 bp, Homo sapiens
aagattaattrgcttatgggc

SEQ ID NO: 13444 - DNA, 21 bp, Homo sapiens
tgtcttacccrtatgtggccc

SEQ ID NO: 13445 - DNA, 21 bp, Homo sapiens
tcttccattcrttagcaaact

SEQ ID NO: 13446 - DNA, 21 bp, Homo sapiens
tttgttttgargcagactggt

SEQ ID NO: 13447 - DNA, 21 bp, Homo sapiens
aagtcagtttkaaaagttagg

SEQ ID NO: 13448 - DNA, 21 bp, Homo sapiens
caaggacaagyggcattgcat

SEQ ID NO: 13449 - DNA, 21 bp, Homo sapiens
atctcacgtgktctaaataat

SEQ ID NO: 13450 - DNA, 21 bp, Homo sapiens
ctgataagggygaggtaataa

SEQ ID NO: 13451 - DNA, 21 bp, Homo sapiens
cattagctatygtttcactct

SEQ ID NO: 13452 - DNA, 21 bp, Homo sapiens
cataagttcayataaatatag

SEQ ID NO: 13453 - DNA, 21 bp, Homo sapiens
atgtttataaygatggtgaag

SEQ ID NO: 13454 - DNA, 21 bp, Homo sapiens
ttgacataaayttatcataca

SEQ ID NO: 13455 - DNA, 21 bp, Homo sapiens
gtaaaattcarctgactgtaa

SEQ ID NO: 13456 - DNA, 21 bp, Homo sapiens
aatccttgtarcctctatgtg

SEQ ID NO: 13457 - DNA, 21 bp, Homo sapiens
gttttatagcrttaaatatgc

SEQ ID NO: 13458 - DNA, 21 bp, Homo sapiens
gcattttaagrtattttttga

SEQ ID NO: 13459 - DNA, 21 bp, Homo sapiens
cagggcatggrcataatattg

SEQ ID NO: 13460 - DNA, 21 bp, Homo sapiens
cctctgggttyctatattatg

SEQ ID NO: 13461 - DNA, 21 bp, Homo sapiens
tagaaacagamgcattagaga

SEQ ID NO: 13462 - DNA, 21 bp, Homo sapiens
ggaagaaggcyattccctaat

SEQ ID NO: 13463 - DNA, 21 bp, Homo sapiens
tgctgaagaayagaagtgaaa

SEQ ID NO: 13464 - DNA, 21 bp, Homo sapiens
gtcgtcttgtrctctagctgc

SEQ ID NO: 13465 - DNA, 21 bp, Homo sapiens
agtgttctcayggactaaaac

SEQ ID NO: 13466 - DNA, 21 bp, Homo sapiens
ttccagctccrtccctaccct

SEQ ID NO: 13467 - DNA, 21 bp, Homo sapiens
ctgtcttccayagagatctag

SEQ ID NO: 13468 - DNA, 21 bp, Homo sapiens
gaaggcccacrtgataggctc

SEQ ID NO: 13469 - DNA, 21 bp, Homo sapiens
tcttccccatyggtacagtaa

SEQ ID NO: 13470 - DNA, 21 bp, Homo sapiens
agcttacattygagttataga

SEQ ID NO: 13471 - DNA, 21 bp, Homo sapiens
taccatgaatrgggtctgatt

SEQ ID NO: 13472 - DNA, 21 bp, Homo sapiens
ggagaatattkacaaagtaaa

SEQ ID NO: 13473 - DNA, 21 bp, Homo sapiens
caggtgaatgkatagagagat

SEQ ID NO: 13474 - DNA, 21 bp, Homo sapiens
atggtctttcrgaagttttcc

SEQ ID NO: 13475 - DNA, 21 bp, Homo sapiens
tgtttttacaygaaccctatt

SEQ ID NO: 13476 - DNA, 21 bp, Homo sapiens
caaagtggagytcaaatcaca

SEQ ID NO: 13477 - DNA, 21 bp, Homo sapiens
ctctcaaccayttcttttgat

SEQ ID NO: 13478 - DNA, 21 bp, Homo sapiens
tctggccaacrttaagcttgg

SEQ ID NO: 13479 - DNA, 21 bp, Homo sapiens
gcgatcaggakttaaaagact

SEQ ID NO: 13480 - DNA, 21 bp, Homo sapiens
gtgtgccactrttaacaaatt

SEQ ID NO: 13481 - DNA, 21 bp, Homo sapiens
ctaaagattcrtttcttggat

SEQ ID NO: 13482 - DNA, 21 bp, Homo sapiens
actaaaagccmgaacttcaca

SEQ ID NO: 13483 - DNA, 21 bp, Homo sapiens
acaaatttggrtgaagatgtg

SEQ ID NO: 13484 - DNA, 21 bp, Homo sapiens
gttttccaccrtttgtagtaa

SEQ ID NO: 13485 - DNA, 21 bp, Homo sapiens
gcttgattacrtttttcttgt

SEQ ID NO: 13486 - DNA, 21 bp, Homo sapiens
tcttctctgtrtttcctgggg

SEQ ID NO: 13487 - DNA, 21 bp, Homo sapiens
tgtaaatggayggagttatct

SEQ ID NO: 13488 - DNA, 21 bp, Homo sapiens
aggatgcaacrggatggcaag

SEQ ID NO: 13489 - DNA, 21 bp, Homo sapiens
atttaaagtarttattatcgc

SEQ ID NO: 13490 - DNA, 21 bp, Homo sapiens
tcaaccagaamttaccccaga

SEQ ID NO: 13491 - DNA, 21 bp, Homo sapiens
aaaatctactrtcaaaatgga

SEQ ID NO: 13492 - DNA, 21 bp, Homo sapiens
ttgtgaagtcrtaatgcaaaa

SEQ ID NO: 13493 - DNA, 21 bp, Homo sapiens
ccgctctttgyctacttggtt

SEQ ID NO: 13494 - DNA, 21 bp, Homo sapiens
ccccaaagcaygagtttctta

SEQ ID NO: 13495 - DNA, 21 bp, Homo sapiens
tcagtcacttmtttccaagtc

SEQ ID NO: 13496 - DNA, 21 bp, Homo sapiens
agaagtggtgrcatttcagca

SEQ ID NO: 13497 - DNA, 21 bp, Homo sapiens
cacggtcaacyctctaacaat

SEQ ID NO: 13498 - DNA, 21 bp, Homo sapiens
aaaacaacaamaattaacaaa

SEQ ID NO: 13499 - DNA, 21 bp, Homo sapiens
aaatatctacrtgtataggct

SEQ ID NO: 13500 - DNA, 21 bp, Homo sapiens
tcaagaaaggrattagtgcgt

SEQ ID NO: 13501 - DNA, 21 bp, Homo sapiens
aagcaacatcytccttagact

SEQ ID NO: 13502 - DNA, 21 bp, Homo sapiens
aggagattcamacttcatttg

SEQ ID NO: 13503 - DNA, 21 bp, Homo sapiens
tgtgtgagaaratatccacgg

SEQ ID NO: 13504 - DNA, 21 bp, Homo sapiens
tatctgggggygtggcctggg

SEQ ID NO: 13505 - DNA, 21 bp, Homo sapiens
cagacagtggygctgggacac

SEQ ID NO: 13506 - DNA, 21 bp, Homo sapiens
taaatttttcraacatacaag

SEQ ID NO: 13507 - DNA, 21 bp, Homo sapiens
ccgaacagatmcctaaagcaa

SEQ ID NO: 13508 - DNA, 21 bp, Homo sapiens
acagtatcagmcacattggcc

SEQ ID NO: 13509 - DNA, 21 bp, Homo sapiens
gtcagaaattrtaagtcaaca

SEQ ID NO: 13510 - DNA, 21 bp, Homo sapiens
aaaagtctccytgtgccccct

SEQ ID NO: 13511 - DNA, 21 bp, Homo sapiens
aaactgttgaycagatctaga

SEQ ID NO: 13512 - DNA, 21 bp, Homo sapiens
aagtcttagaygacgccagag

SEQ ID NO: 13513 - DNA, 21 bp, Homo sapiens
aatcaaattamcttctattat

SEQ ID NO: 13514 - DNA, 21 bp, Homo sapiens
attgtttcatyacatgacaaa

SEQ ID NO: 13515 - DNA, 21 bp, Homo sapiens
taaagcaatgycacgcctggt

SEQ ID NO: 13516 - DNA, 21 bp, Homo sapiens
atggactttayagttgctgaa

SEQ ID NO: 13517 - DNA, 21 bp, Homo sapiens
cagtttttgaytgatattgag

SEQ ID NO: 13518 - DNA, 21 bp, Homo sapiens
atagagggccratttgtatag

SEQ ID NO: 13519 - DNA, 21 bp, Homo sapiens
aacaagacagyaagtacatga

SEQ ID NO: 13520 - DNA, 21 bp, Homo sapiens
caaagatccaytgaaatggtc

SEQ ID NO: 13521 - DNA, 21 bp, Homo sapiens
cctctcaaccrcattatttct

SEQ ID NO: 13522 - DNA, 21 bp, Homo sapiens
ccaaataaaayaactcacttt

SEQ ID NO: 13523 - DNA, 21 bp, Homo sapiens
gagatcatatrctgtcagatc

SEQ ID NO: 13524 - DNA, 21 bp, Homo sapiens
ctttgactatrgatatttttt

SEQ ID NO: 13525 - DNA, 21 bp, Homo sapiens
ggtcaaatcaytgaatttgac

SEQ ID NO: 13526 - DNA, 21 bp, Homo sapiens
atagatgacayccttaatata

SEQ ID NO: 13527 - DNA, 21 bp, Homo sapiens
ggtttatggarctacaagtat

SEQ ID NO: 13528 - DNA, 21 bp, Homo sapiens
atagtggcctrtgccccagga

SEQ ID NO: 13529 - DNA, 21 bp, Homo sapiens
attctgacatragctccccag

SEQ ID NO: 13530 - DNA, 21 bp, Homo sapiens
gtctgtatgtrgtaatcatgc

SEQ ID NO: 13531 - DNA, 21 bp, Homo sapiens
tgtgcccaagmtttttagttg

SEQ ID NO: 13532 - DNA, 21 bp, Homo sapiens
tggaacacaayttataaatct

SEQ ID NO: 13533 - DNA, 21 bp, Homo sapiens
atgttaagggmtaaatggatg

SEQ ID NO: 13534 - DNA, 21 bp, Homo sapiens
attttccccaytgaatttagt

SEQ ID NO: 13535 - DNA, 21 bp, Homo sapiens
aactagtcagrtttcaaagcc

SEQ ID NO: 13536 - DNA, 21 bp, Homo sapiens
ggtcgaaaagmgtcaatgcaa

SEQ ID NO: 13537 - DNA, 21 bp, Homo sapiens
aagggccaaaracatcctttt

SEQ ID NO: 13538 - DNA, 21 bp, Homo sapiens
catcatccagmattgcgtcca

SEQ ID NO: 13539 - DNA, 21 bp, Homo sapiens
tgtcaaaggarcaggaaggtt

SEQ ID NO: 13540 - DNA, 21 bp, Homo sapiens
cagtctctagkcttcctcttt

SEQ ID NO: 13541 - DNA, 21 bp, Homo sapiens
ccagagaaccygtgaaaattc

SEQ ID NO: 13542 - DNA, 21 bp, Homo sapiens
aaggctgacaygtaagacttt

SEQ ID NO: 13543 - DNA, 21 bp, Homo sapiens
accaaaatcayttagtttatc

SEQ ID NO: 13544 - DNA, 21 bp, Homo sapiens
gttctcggtgyggacagctca

SEQ ID NO: 13545 - DNA, 21 bp, Homo sapiens
gtggcacatcycttatttggt

SEQ ID NO: 13546 - DNA, 21 bp, Homo sapiens
tcctgttgacyttgttatgtg

SEQ ID NO: 13547 - DNA, 21 bp, Homo sapiens
aggaggctggyaaatggtttc

SEQ ID NO: 13548 - DNA, 21 bp, Homo sapiens
taatggtcttyagtttatccc

SEQ ID NO: 13549 - DNA, 21 bp, Homo sapiens
gtgttcttatyttttctgtgc

SEQ ID NO: 13550 - DNA, 21 bp, Homo sapiens
gaaagcctctrttacttgctg

SEQ ID NO: 13551 - DNA, 21 bp, Homo sapiens
tatcaaattarcgtttttgcc

SEQ ID NO: 13552 - DNA, 21 bp, Homo sapiens
ggctcagtaayaataggaaac

SEQ ID NO: 13553 - DNA, 21 bp, Homo sapiens
caatgctgcarctttaatcaa

SEQ ID NO: 13554 - DNA, 21 bp, Homo sapiens
ggagaaacgtraaagagtcac

SEQ ID NO: 13555 - DNA, 21 bp, Homo sapiens
ggctctgccaytgggtaattc

SEQ ID NO: 13556 - DNA, 21 bp, Homo sapiens
ttaaatatctrgcaatacaat

SEQ ID NO: 13557 - DNA, 21 bp, Homo sapiens
gaaagatatckgttcataaag

SEQ ID NO: 13558 - DNA, 21 bp, Homo sapiens
ttttgtcatgraaaagtcagc

SEQ ID NO: 13559 - DNA, 21 bp, Homo sapiens
ggagataacamcacgtatcaa

SEQ ID NO: 13560 - DNA, 21 bp, Homo sapiens
tagaaaatgaratgtcggttg

SEQ ID NO: 13561 - DNA, 21 bp, Homo sapiens
attgattttcrtgtattaatc

SEQ ID NO: 13562 - DNA, 21 bp, Homo sapiens
agaacgattgmcactctacct

SEQ ID NO: 13563 - DNA, 21 bp, Homo sapiens
tagagtcctcractgtgtttt

SEQ ID NO: 13564 - DNA, 21 bp, Homo sapiens
gtgagataatyacgcctaggt

SEQ ID NO: 13565 - DNA, 21 bp, Homo sapiens
cttcctgaaaygggctcatca

SEQ ID NO: 13566 - DNA, 21 bp, Homo sapiens
acaagctgcarttcatgcaag

SEQ ID NO: 13567 - DNA, 21 bp, Homo sapiens
ggcggccgccrtggcagtgtc

SEQ ID NO: 13568 - DNA, 21 bp, Homo sapiens
tttaaattctyatatctgtga

SEQ ID NO: 13569 - DNA, 21 bp, Homo sapiens
tctcccaccckgtgggattgt

SEQ ID NO: 13570 - DNA, 21 bp, Homo sapiens
gttcagctctrgattagtcca

SEQ ID NO: 13571 - DNA, 21 bp, Homo sapiens
aatgtgcaatytgtaggtaaa

SEQ ID NO: 13572 - DNA, 21 bp, Homo sapiens
gacaacttttrtattttttat

SEQ ID NO: 13573 - DNA, 21 bp, Homo sapiens
ttggaaaagtyatgcagcttt

SEQ ID NO: 13574 - DNA, 21 bp, Homo sapiens
cgttaaggaarttctgctctg

SEQ ID NO: 13575 - DNA, 21 bp, Homo sapiens
gaggacaattmtcttggaaag

SEQ ID NO: 13576 - DNA, 21 bp, Homo sapiens
aatgggatcaygcaaatgtgt

SEQ ID NO: 13577 - DNA, 21 bp, Homo sapiens
gaaatgtaaaytcttgggatg

SEQ ID NO: 13578 - DNA, 21 bp, Homo sapiens
gcatggtttgratccttttaa

SEQ ID NO: 13579 - DNA, 21 bp, Homo sapiens
cattaagtagkttctcagtaa

SEQ ID NO: 13580 - DNA, 21 bp, Homo sapiens
aagtgccaacrttaacactcc

SEQ ID NO: 13581 - DNA, 21 bp, Homo sapiens
tataatctctyactgcatgca

SEQ ID NO: 13582 - DNA, 21 bp, Homo sapiens
atttgaggatrtaggggtaac

SEQ ID NO: 13583 - DNA, 21 bp, Homo sapiens
agttacaaagrtaagaaatat

SEQ ID NO: 13584 - DNA, 21 bp, Homo sapiens
atttgttatcygagaaaatga

SEQ ID NO: 13585 - DNA, 21 bp, Homo sapiens
gtcctgaggakgaaacagaag

SEQ ID NO: 13586 - DNA, 21 bp, Homo sapiens
aaagaaaatayacacttgaga

SEQ ID NO: 13587 - DNA, 21 bp, Homo sapiens
ggagaaacgcytctgctgctc

SEQ ID NO: 13588 - DNA, 21 bp, Homo sapiens
caaaaaatatrtgaactgaaa

SEQ ID NO: 13589 - DNA, 21 bp, Homo sapiens
cttttgttctyccaggacttc

SEQ ID NO: 13590 - DNA, 21 bp, Homo sapiens
ttctcttgttygtaacaatct

SEQ ID NO: 13591 - DNA, 21 bp, Homo sapiens
gggaagagtaraattttagga

SEQ ID NO: 13592 - DNA, 21 bp, Homo sapiens
gtacagggagkggggacacag

SEQ ID NO: 13593 - DNA, 21 bp, Homo sapiens
ttagatgaagmataaaggata

SEQ ID NO: 13594 - DNA, 21 bp, Homo sapiens
ggggcagatamgctagaagtg

SEQ ID NO: 13595 - DNA, 21 bp, Homo sapiens
cttatgcattyaggagttctc

SEQ ID NO: 13596 - DNA, 21 bp, Homo sapiens
ttttttcttarttttactata

SEQ ID NO: 13597 - DNA, 21 bp, Homo sapiens
caatatggcayaggggcagca

SEQ ID NO: 13598 - DNA, 21 bp, Homo sapiens
taaacaggaakatgaaagaat

SEQ ID NO: 13599 - DNA, 21 bp, Homo sapiens
tatatttaatytttgtctaat

SEQ ID NO: 13600 - DNA, 21 bp, Homo sapiens
actcatgcagyttcaatgatg

SEQ ID NO: 13601 - DNA, 21 bp, Homo sapiens
gacattgtatyatttcttaag

SEQ ID NO: 13602 - DNA, 21 bp, Homo sapiens
tatataagctkccctgttcac

SEQ ID NO: 13603 - DNA, 21 bp, Homo sapiens
atacgtcttcrtaaaaacttg

SEQ ID NO: 13604 - DNA, 21 bp, Homo sapiens
gagatcaaccycacgccgttt

SEQ ID NO: 13605 - DNA, 21 bp, Homo sapiens
tttttagtgcrcttattagta

SEQ ID NO: 13606 - DNA, 21 bp, Homo sapiens
agcagggagaycagctaggag

SEQ ID NO: 13607 - DNA, 21 bp, Homo sapiens
tacacttcttkggaattcaat

SEQ ID NO: 13608 - DNA, 21 bp, Homo sapiens
gccctgcttcytcctgccctg

SEQ ID NO: 13609 - DNA, 21 bp, Homo sapiens
ctgccaatgtrtttttcaaca

SEQ ID NO: 13610 - DNA, 21 bp, Homo sapiens
acattttcagytggttcagta

SEQ ID NO: 13611 - DNA, 21 bp, Homo sapiens
catagacgttmggcttccctg

SEQ ID NO: 13612 - DNA, 21 bp, Homo sapiens
caaattaccartaagaaaatg

SEQ ID NO: 13613 - DNA, 21 bp, Homo sapiens
aaatgttggakgcaaaattta

SEQ ID NO: 13614 - DNA, 21 bp, Homo sapiens
aaaaaagagtyatataaacta

SEQ ID NO: 13615 - DNA, 21 bp, Homo sapiens
ctgttgtgcartttgtgcttt

SEQ ID NO: 13616 - DNA, 21 bp, Homo sapiens
ataaagaataygggtaggtat

SEQ ID NO: 13617 - DNA, 21 bp, Homo sapiens
ctgctggggtraaatggcaac

SEQ ID NO: 13618 - DNA, 21 bp, Homo sapiens
ttagcttctcytaatttcaca

SEQ ID NO: 13619 - DNA, 21 bp, Homo sapiens
tatgtattatkatgctcaggg

SEQ ID NO: 13620 - DNA, 21 bp, Homo sapiens
ggtattcgccrggtgcagcgg

SEQ ID NO: 13621 - DNA, 21 bp, Homo sapiens
cggaattgtamgtaaagtcac

SEQ ID NO: 13622 - DNA, 21 bp, Homo sapiens
gtatggagttygatgcctcct

SEQ ID NO: 13623 - DNA, 21 bp, Homo sapiens
cactacattgyagtaaaaatg

SEQ ID NO: 13624 - DNA, 21 bp, Homo sapiens
atgtatctgtmgttctattga

SEQ ID NO: 13625 - DNA, 21 bp, Homo sapiens
acttctgtcarttccttctag

SEQ ID NO: 13626 - DNA, 21 bp, Homo sapiens
aataaatgcaygtggtaaaga

SEQ ID NO: 13627 - DNA, 21 bp, Homo sapiens
tatgcaaagaycatgaaataa

SEQ ID NO: 13628 - DNA, 21 bp, Homo sapiens
ttacagaaggrttatgatagc

SEQ ID NO: 13629 - DNA, 21 bp, Homo sapiens
ttttggccagktgtacattac

SEQ ID NO: 13630 - DNA, 21 bp, Homo sapiens
ggtcaaggtgrctggttctct

SEQ ID NO: 13631 - DNA, 21 bp, Homo sapiens
ccccagaagaygaatcatgtt

SEQ ID NO: 13632 - DNA, 21 bp, Homo sapiens
ttgattttctkgccaaattaa

SEQ ID NO: 13633 - DNA, 21 bp, Homo sapiens
ttacaataatyttagtcctat

SEQ ID NO: 13634 - DNA, 21 bp, Homo sapiens
atgttgcataytgagataggc

SEQ ID NO: 13635 - DNA, 21 bp, Homo sapiens
caaggctaggkgtccaatctc

SEQ ID NO: 13636 - DNA, 21 bp, Homo sapiens
cattgcatatytgagatggta

SEQ ID NO: 13637 - DNA, 21 bp, Homo sapiens
ccttccttttkgcttattttt

SEQ ID NO: 13638 - DNA, 21 bp, Homo sapiens
tcaatacttcytctgagttta

SEQ ID NO: 13639 - DNA, 21 bp, Homo sapiens
aaatctataaygtgtaactga

SEQ ID NO: 13640 - DNA, 21 bp, Homo sapiens
actcatcaccrcaaatcactt

SEQ ID NO: 13641 - DNA, 21 bp, Homo sapiens
ccatgaaacayagatcaaggt

SEQ ID NO: 13642 - DNA, 21 bp, Homo sapiens
atacaccctgytatggtttat

SEQ ID NO: 13643 - DNA, 21 bp, Homo sapiens
tttgaacactmctcagctttc

SEQ ID NO: 13644 - DNA, 21 bp, Homo sapiens
tcccataggaytcatttcttt

SEQ ID NO: 13645 - DNA, 21 bp, Homo sapiens
aatattccatygtctgctgtt

SEQ ID NO: 13646 - DNA, 21 bp, Homo sapiens
gtgattgctartcattttagg

SEQ ID NO: 13647 - DNA, 21 bp, Homo sapiens
caacaatgagrtggtggttgt

SEQ ID NO: 13648 - DNA, 21 bp, Homo sapiens
aagcacacatraccctgcaag

SEQ ID NO: 13649 - DNA, 21 bp, Homo sapiens
attatcacacrtagaccagtc

SEQ ID NO: 13650 - DNA, 21 bp, Homo sapiens
agtgatcagcraaatcatttt

SEQ ID NO: 13651 - DNA, 21 bp, Homo sapiens
tataaatgttytccagattgt

SEQ ID NO: 13652 - DNA, 21 bp, Homo sapiens
tatccacagaygttagttgaa

SEQ ID NO: 13653 - DNA, 21 bp, Homo sapiens
ttcatataacrctcaaatctc

SEQ ID NO: 13654 - DNA, 21 bp, Homo sapiens
ttcaagttaaytaggtggtag

SEQ ID NO: 13655 - DNA, 21 bp, Homo sapiens
ccaccttaaartgagggagtc

SEQ ID NO: 13656 - DNA, 21 bp, Homo sapiens
gtagaaatggmttcaaatatt

SEQ ID NO: 13657 - DNA, 21 bp, Homo sapiens
cactaaagtgytatttgctta

SEQ ID NO: 13658 - DNA, 21 bp, Homo sapiens
ttgtggtctcmcctcttcaga

SEQ ID NO: 13659 - DNA, 21 bp, Homo sapiens
tgaggtgatgrcactgcccaa

SEQ ID NO: 13660 - DNA, 21 bp, Homo sapiens
tgccaagacaygaatgattat

SEQ ID NO: 13661 - DNA, 21 bp, Homo sapiens
tgagcttcaaygagcatctag

SEQ ID NO: 13662 - DNA, 21 bp, Homo sapiens
cattgtcatcycccatgaggg

SEQ ID NO: 13663 - DNA, 21 bp, Homo sapiens
tgcttccccartgggaaatga

SEQ ID NO: 13664 - DNA, 21 bp, Homo sapiens
ggtttagcaarctgtccaggg

SEQ ID NO: 13665 - DNA, 21 bp, Homo sapiens
ctgtgagtacrtggaagaatg

SEQ ID NO: 13666 - DNA, 21 bp, Homo sapiens
aaacccagtgytagatctttt

SEQ ID NO: 13667 - DNA, 21 bp, Homo sapiens
accactagtamggtttgagct

SEQ ID NO: 13668 - DNA, 21 bp, Homo sapiens
acaagagagartgatatatga

SEQ ID NO: 13669 - DNA, 21 bp, Homo sapiens
tgccaagctckcgggtaataa

SEQ ID NO: 13670 - DNA, 21 bp, Homo sapiens
aagctacatakgaaaatccac

SEQ ID NO: 13671 - DNA, 21 bp, Homo sapiens
agtacattctyaggaagagct

SEQ ID NO: 13672 - DNA, 21 bp, Homo sapiens
gcaacttcagkccagaaatga

SEQ ID NO: 13673 - DNA, 21 bp, Homo sapiens
tctaatatcayttaaaatcta

SEQ ID NO: 13674 - DNA, 21 bp, Homo sapiens
attccagattyactgtcctta

SEQ ID NO: 13675 - DNA, 21 bp, Homo sapiens
agcatgcagaytggagatact

SEQ ID NO: 13676 - DNA, 21 bp, Homo sapiens
gtgtctctgaygtgggtaatt

SEQ ID NO: 13677 - DNA, 21 bp, Homo sapiens
acacatctttycatagcaaca

SEQ ID NO: 13678 - DNA, 21 bp, Homo sapiens
tcacctcactktcctgcatcc

SEQ ID NO: 13679 - DNA, 21 bp, Homo sapiens
aaagcaggaaraataagataa

SEQ ID NO: 13680 - DNA, 21 bp, Homo sapiens
gagcacagctkttgtgaaaag

SEQ ID NO: 13681 - DNA, 21 bp, Homo sapiens
tacgtagtacycgtcaagcaa

SEQ ID NO: 13682 - DNA, 21 bp, Homo sapiens
atattctgackcacacaaact

SEQ ID NO: 13683 - DNA, 21 bp, Homo sapiens
gaaattatgakagagcctaga

SEQ ID NO: 13684 - DNA, 21 bp, Homo sapiens
gactgggggargtcacgccat

SEQ ID NO: 13685 - DNA, 21 bp, Homo sapiens
ctcttgattcygcttccagca

SEQ ID NO: 13686 - DNA, 21 bp, Homo sapiens
gagacattgaygctgtgctct

SEQ ID NO: 13687 - DNA, 21 bp, Homo sapiens
ggagttgtcaygtctcctcag

SEQ ID NO: 13688 - DNA, 21 bp, Homo sapiens
taacttttgtrtattatattg

SEQ ID NO: 13689 - DNA, 21 bp, Homo sapiens
ctcaccaccayccctcaagcc

SEQ ID NO: 13690 - DNA, 21 bp, Homo sapiens
caaagccaccrtctttttacc

SEQ ID NO: 13691 - DNA, 21 bp, Homo sapiens
gcccactgacraaggcgtcca

SEQ ID NO: 13692 - DNA, 21 bp, Homo sapiens
gaaatggcgcraactcggact

SEQ ID NO: 13693 - DNA, 21 bp, Homo sapiens
gcgtagacaartcacaggaga

SEQ ID NO: 13694 - DNA, 21 bp, Homo sapiens
agtgacacggyggccttcact

SEQ ID NO: 13695 - DNA, 21 bp, Homo sapiens
agagatcagcyggtggtttct

SEQ ID NO: 13696 - DNA, 21 bp, Homo sapiens
tcaacttcaaygattgcggga

SEQ ID NO: 13697 - DNA, 21 bp, Homo sapiens
tttgtccatcmctgccgagca

SEQ ID NO: 13698 - DNA, 21 bp, Homo sapiens
ccggaagctaktgtggccaca

SEQ ID NO: 13699 - DNA, 21 bp, Homo sapiens
gcaaccacctygtgctaaaaa

SEQ ID NO: 13700 - DNA, 21 bp, Homo sapiens
ggagctacagrcctggggcat

SEQ ID NO: 13701 - DNA, 21 bp, Homo sapiens
cagcccagttkgtaggattag

SEQ ID NO: 13702 - DNA, 21 bp, Homo sapiens
cagcctcaccyattattctga

SEQ ID NO: 13703 - DNA, 21 bp, Homo sapiens
ggtgacacacrgacagaggcc

SEQ ID NO: 13704 - DNA, 21 bp, Homo sapiens
gcagcttgggyggcatcactg

SEQ ID NO: 13705 - DNA, 21 bp, Homo sapiens
tggaacagacycatctgcctg

SEQ ID NO: 13706 - DNA, 21 bp, Homo sapiens
atgagtatacygtcactgtgt

SEQ ID NO: 13707 - DNA, 21 bp, Homo sapiens
cggcccaggcygaggacagag

SEQ ID NO: 13708 - DNA, 21 bp, Homo sapiens
caggcagactyggatggaggt

SEQ ID NO: 13709 - DNA, 21 bp, Homo sapiens
tccacacacgrcatgaccaca

SEQ ID NO: 13710 - DNA, 21 bp, Homo sapiens
tggggccaagrcaactgtaac

SEQ ID NO: 13711 - DNA, 21 bp, Homo sapiens
tagcgggaagkgggaggccat

SEQ ID NO: 13712 - DNA, 21 bp, Homo sapiens
atcaaaggtcrtctagggtta

SEQ ID NO: 13713 - DNA, 21 bp, Homo sapiens
aagctcttccmaagatccgcc

SEQ ID NO: 13714 - DNA, 21 bp, Homo sapiens
ccaatgttctyggacgtcccc

SEQ ID NO: 13715 - DNA, 21 bp, Homo sapiens
cttcctatggycttcactgaa

SEQ ID NO: 13716 - DNA, 21 bp, Homo sapiens
cctgttttgcycaaggattac

SEQ ID NO: 13717 - DNA, 21 bp, Homo sapiens
ctattcttttkaagtgtagat

SEQ ID NO: 13718 - DNA, 21 bp, Homo sapiens
ttttgggaccyatgtagcatg

SEQ ID NO: 13719 - DNA, 21 bp, Homo sapiens
ccagtaatacrtcatagggat

SEQ ID NO: 13720 - DNA, 21 bp, Homo sapiens
aagccaccagrggcttccaaa

SEQ ID NO: 13721 - DNA, 21 bp, Homo sapiens
cttggttttckgggtgccagg

SEQ ID NO: 13722 - DNA, 21 bp, Homo sapiens
ttagacgcagyttgtagatcc

SEQ ID NO: 13723 - DNA, 21 bp, Homo sapiens
cctggggtgcygagcctgctc

SEQ ID NO: 13724 - DNA, 21 bp, Homo sapiens
cactgggccaygccgcagatt

SEQ ID NO: 13725 - DNA, 21 bp, Homo sapiens
gcttttatcamctgcagggca

SEQ ID NO: 13726 - DNA, 21 bp, Homo sapiens
gccggggagayggaggaaggt

SEQ ID NO: 13727 - DNA, 21 bp, Homo sapiens
ctgacttgaaratccataata

SEQ ID NO: 13728 - DNA, 21 bp, Homo sapiens
gatgtcaggcrtgtttttgtt

SEQ ID NO: 13729 - DNA, 21 bp, Homo sapiens
gtccagcacaraatttgcaca

SEQ ID NO: 13730 - DNA, 21 bp, Homo sapiens
tgagaacctgyaggaacgcag

SEQ ID NO: 13731 - DNA, 21 bp, Homo sapiens
tattctaattmtttgtcactt

SEQ ID NO: 13732 - DNA, 21 bp, Homo sapiens
gctgggtggtkatctacttag

SEQ ID NO: 13733 - DNA, 21 bp, Homo sapiens
catagctttcrtgtcttcttg

SEQ ID NO: 13734 - DNA, 21 bp, Homo sapiens
agagaccaggyttttgatgtc

SEQ ID NO: 13735 - DNA, 21 bp, Homo sapiens
ttgaataaagyagtcacctgg

SEQ ID NO: 13736 - DNA, 21 bp, Homo sapiens
tccactcaaamtagcaaaaga

SEQ ID NO: 13737 - DNA, 21 bp, Homo sapiens
tcaggtcattygaagctgtac

SEQ ID NO: 13738 - DNA, 21 bp, Homo sapiens
ttctcccaatraggacatctt

SEQ ID NO: 13739 - DNA, 21 bp, Homo sapiens
catgagaaatygtcctgagtc

SEQ ID NO: 13740 - DNA, 21 bp, Homo sapiens
gtgaaagtaayagcaatcact

SEQ ID NO: 13741 - DNA, 21 bp, Homo sapiens
aattgttaaaygtaaaattat

SEQ ID NO: 13742 - DNA, 21 bp, Homo sapiens
tatcatctccrtacagcaagt

SEQ ID NO: 13743 - DNA, 21 bp, Homo sapiens
atttgaaggcrtgtccagcag

SEQ ID NO: 13744 - DNA, 21 bp, Homo sapiens
atggcctgagragcttatcct

SEQ ID NO: 13745 - DNA, 21 bp, Homo sapiens
ttcccgaggtmtgaagccagt

SEQ ID NO: 13746 - DNA, 21 bp, Homo sapiens
gtgaaaaactycaagggcagc

SEQ ID NO: 13747 - DNA, 21 bp, Homo sapiens
tctctgtaagygtagacagct

SEQ ID NO: 13748 - DNA, 21 bp, Homo sapiens
cagatatggtrcagggctaaa

SEQ ID NO: 13749 - DNA, 21 bp, Homo sapiens
gacatcagaarcaaagattgt

SEQ ID NO: 13750 - DNA, 21 bp, Homo sapiens
tggactagaartgaacagatc

SEQ ID NO: 13751 - DNA, 21 bp, Homo sapiens
gtcctaaaatrtcagtgaaat

SEQ ID NO: 13752 - DNA, 21 bp, Homo sapiens
cttcacttaayatgtagacat

SEQ ID NO: 13753 - DNA, 21 bp, Homo sapiens
aagaagttacrctagagatgt

SEQ ID NO: 13754 - DNA, 21 bp, Homo sapiens
aaatacatagrccaacaactg

SEQ ID NO: 13755 - DNA, 21 bp, Homo sapiens
ctaatttttcrtttggtagtg

SEQ ID NO: 13756 - DNA, 21 bp, Homo sapiens
aggacgttcaygttaaagaga

SEQ ID NO: 13757 - DNA, 21 bp, Homo sapiens
ggtcatgactmacgactgggt

SEQ ID NO: 13758 - DNA, 21 bp, Homo sapiens
agttggcagtyccagttgacc

SEQ ID NO: 13759 - DNA, 21 bp, Homo sapiens
taagtggatgkgatgagaata

SEQ ID NO: 13760 - DNA, 21 bp, Homo sapiens
ggatggcaggyataatgcaca

SEQ ID NO: 13761 - DNA, 21 bp, Homo sapiens
aagacccaacrtattttcaac

SEQ ID NO: 13762 - DNA, 21 bp, Homo sapiens
ttctcctcctkgcagtctctc

SEQ ID NO: 13763 - DNA, 21 bp, Homo sapiens
aatcatcagcmtaatttgctt

SEQ ID NO: 13764 - DNA, 21 bp, Homo sapiens
ttcagtcgtgyagtcaccggc

SEQ ID NO: 13765 - DNA, 21 bp, Homo sapiens
ctcactgttaktatgagaatt

SEQ ID NO: 13766 - DNA, 21 bp, Homo sapiens
gctggtaaaayacaccttcca

SEQ ID NO: 13767 - DNA, 21 bp, Homo sapiens
aaaaccagccrctgaagaatg

SEQ ID NO: 13768 - DNA, 21 bp, Homo sapiens
tgactcaagtrgcaatgatgt

SEQ ID NO: 13769 - DNA, 21 bp, Homo sapiens
actgagtgccrgttacaggca

SEQ ID NO: 13770 - DNA, 21 bp, Homo sapiens
agggactgcgygtagtgttca

SEQ ID NO: 13771 - DNA, 21 bp, Homo sapiens
tgtgacgtgtrttcatcagca

SEQ ID NO: 13772 - DNA, 21 bp, Homo sapiens
tctataaattytctcacactg

SEQ ID NO: 13773 - DNA, 21 bp, Homo sapiens
tgaccaaacarcttgggcact

SEQ ID NO: 13774 - DNA, 21 bp, Homo sapiens
ctcctcttccytgtgtactca

SEQ ID NO: 13775 - DNA, 21 bp, Homo sapiens
tgctcaggtayagggcatgtt

SEQ ID NO: 13776 - DNA, 21 bp, Homo sapiens
caattcaattrgagcaaaaag

SEQ ID NO: 13777 - DNA, 21 bp, Homo sapiens
caatgggtaayatattatggg

SEQ ID NO: 13778 - DNA, 21 bp, Homo sapiens
tcttagaacayccaaactctg

SEQ ID NO: 13779 - DNA, 21 bp, Homo sapiens
actacaggatrgcacagttac

SEQ ID NO: 13780 - DNA, 21 bp, Homo sapiens
gaagcatttarcgctatccct

SEQ ID NO: 13781 - DNA, 21 bp, Homo sapiens
ttcagtttcamttataccatg

SEQ ID NO: 13782 - DNA, 21 bp, Homo sapiens
aggctctacamgtgagcctgg

SEQ ID NO: 13783 - DNA, 21 bp, Homo sapiens
aacacacgaayaataatgcat

SEQ ID NO: 13784 - DNA, 21 bp, Homo sapiens
acaatttaaaygaggcctgtc

SEQ ID NO: 13785 - DNA, 21 bp, Homo sapiens
aaattatcaargagaagatag

SEQ ID NO: 13786 - DNA, 21 bp, Homo sapiens
catttcatcaytgacactttt

SEQ ID NO: 13787 - DNA, 21 bp, Homo sapiens
agaagaaagtraccttggaaa

SEQ ID NO: 13788 - DNA, 21 bp, Homo sapiens
tggagaagtcygcttctgttg

SEQ ID NO: 13789 - DNA, 21 bp, Homo sapiens
cagtcaacaaygagatgaagg

SEQ ID NO: 13790 - DNA, 21 bp, Homo sapiens
tagtttagcayagatcttgca

SEQ ID NO: 13791 - DNA, 21 bp, Homo sapiens
ggatctgtcaytggagtcaag

SEQ ID NO: 13792 - DNA, 21 bp, Homo sapiens
tcaatttcacyaagtccagag

SEQ ID NO: 13793 - DNA, 21 bp, Homo sapiens
agattttaggrgatgaagaat

SEQ ID NO: 13794 - DNA, 21 bp, Homo sapiens
ttctcctctamacccatgaac

SEQ ID NO: 13795 - DNA, 21 bp, Homo sapiens
ctacagctacrtgtttggtgg

SEQ ID NO: 13796 - DNA, 21 bp, Homo sapiens
gcagcctgtckgaacaggctt

SEQ ID NO: 13797 - DNA, 21 bp, Homo sapiens
cttgcctttcrtttcatccat

SEQ ID NO: 13798 - DNA, 21 bp, Homo sapiens
tctcgagtctyttttattttt

SEQ ID NO: 13799 - DNA, 21 bp, Homo sapiens
ttaacaccagkcaattggcat

SEQ ID NO: 13800 - DNA, 21 bp, Homo sapiens
atgaaccctgkgctgggagag

SEQ ID NO: 13801 - DNA, 21 bp, Homo sapiens
ctcataccacrtagttatccc

SEQ ID NO: 13802 - DNA, 21 bp, Homo sapiens
tacttctactyataatcagtt

SEQ ID NO: 13803 - DNA, 21 bp, Homo sapiens
tttttcatcaygtagcctaaa

SEQ ID NO: 13804 - DNA, 21 bp, Homo sapiens
tgtatcacctygattctgcga

SEQ ID NO: 13805 - DNA, 21 bp, Homo sapiens
ccaacagctcktgaccccagt

SEQ ID NO: 13806 - DNA, 21 bp, Homo sapiens
caagatacacrgttaaatata

SEQ ID NO: 13807 - DNA, 21 bp, Homo sapiens
gaccatcaacrtaggacactg

SEQ ID NO: 13808 - DNA, 21 bp, Homo sapiens
tcattccccamatggctctca

SEQ ID NO: 13809 - DNA, 21 bp, Homo sapiens
ctccccaaccrcaaccccttc

SEQ ID NO: 13810 - DNA, 21 bp, Homo sapiens
ctgaaggcagrggaccatcag

SEQ ID NO: 13811 - DNA, 21 bp, Homo sapiens
gtggcattgcygcaattactt

SEQ ID NO: 13812 - DNA, 21 bp, Homo sapiens
gacttgcctgracttattccc

SEQ ID NO: 13813 - DNA, 21 bp, Homo sapiens
atggagggcarttgtcattat

SEQ ID NO: 13814 - DNA, 21 bp, Homo sapiens
agcaaggccartgaaagtgat

SEQ ID NO: 13815 - DNA, 21 bp, Homo sapiens
gtctgcaaaaygtaactgctt

SEQ ID NO: 13816 - DNA, 21 bp, Homo sapiens
ggcaggaatcrggacaatttt

SEQ ID NO: 13817 - DNA, 21 bp, Homo sapiens
ctccgtttttrttctgtacct

SEQ ID NO: 13818 - DNA, 21 bp, Homo sapiens
ctttcctgctyttcatatatt

SEQ ID NO: 13819 - DNA, 21 bp, Homo sapiens
acatctaatcmtattgtgaca

SEQ ID NO: 13820 - DNA, 21 bp, Homo sapiens
tgaccagatgraaggagctag

SEQ ID NO: 13821 - DNA, 21 bp, Homo sapiens
acagagcatgrccccagacca

SEQ ID NO: 13822 - DNA, 21 bp, Homo sapiens
ttctttccacrtaagtcaggg

SEQ ID NO: 13823 - DNA, 21 bp, Homo sapiens
tacttatctayttaggcagcc

SEQ ID NO: 13824 - DNA, 21 bp, Homo sapiens
aatacttagarggccctttaa

SEQ ID NO: 13825 - DNA, 21 bp, Homo sapiens
ccctatgttgyccctgtattc

SEQ ID NO: 13826 - DNA, 21 bp, Homo sapiens
agagaaaataycagagagcat

SEQ ID NO: 13827 - DNA, 21 bp, Homo sapiens
tgtagcaaacrtactatgatg

SEQ ID NO: 13828 - DNA, 21 bp, Homo sapiens
ctgagccgtgmattcatttct

SEQ ID NO: 13829 - DNA, 21 bp, Homo sapiens
cagtattatcyacaaaaaacc

SEQ ID NO: 13830 - DNA, 21 bp, Homo sapiens
tccaccttaamaacattagtt

SEQ ID NO: 13831 - DNA, 21 bp, Homo sapiens
ggtagtgagaratagctttta

SEQ ID NO: 13832 - DNA, 21 bp, Homo sapiens
ctacttaaaaygactgagatt

SEQ ID NO: 13833 - DNA, 21 bp, Homo sapiens
agtagaaagamgacttataaa

SEQ ID NO: 13834 - DNA, 21 bp, Homo sapiens
cttaaatggcrtgaaccactg

SEQ ID NO: 13835 - DNA, 21 bp, Homo sapiens
tgataaaatayagaatttgat

SEQ ID NO: 13836 - DNA, 21 bp, Homo sapiens
catgcttataytcccttggga

SEQ ID NO: 13837 - DNA, 21 bp, Homo sapiens
gactttatttkcattattgtg

SEQ ID NO: 13838 - DNA, 21 bp, Homo sapiens
gtgaaaagcaytgaagaggaa

SEQ ID NO: 13839 - DNA, 21 bp, Homo sapiens
aagtgcagacrgcgtcacaaa

SEQ ID NO: 13840 - DNA, 21 bp, Homo sapiens
tgtgcaaacarctggcagttc

SEQ ID NO: 13841 - DNA, 21 bp, Homo sapiens
gaacacatttyaatatctctg

SEQ ID NO: 13842 - DNA, 21 bp, Homo sapiens
tgtgtgcataytggaagatag

SEQ ID NO: 13843 - DNA, 21 bp, Homo sapiens
ctgctgctaargtagatgagt

SEQ ID NO: 13844 - DNA, 21 bp, Homo sapiens
gggacatttcyggaagggctt

SEQ ID NO: 13845 - DNA, 21 bp, Homo sapiens
tatggagtacrgtcacaagat

SEQ ID NO: 13846 - DNA, 21 bp, Homo sapiens
ccttaggttgrtagagccttc

SEQ ID NO: 13847 - DNA, 21 bp, Homo sapiens
cacttctgtgrgttagaagtc

SEQ ID NO: 13848 - DNA, 21 bp, Homo sapiens
tgagacattcrgaatttcgtt

SEQ ID NO: 13849 - DNA, 21 bp, Homo sapiens
aattgactttmgatcagccaa

SEQ ID NO: 13850 - DNA, 21 bp, Homo sapiens
agccaggctgycagttttcac

SEQ ID NO: 13851 - DNA, 21 bp, Homo sapiens
cctcctttagrcacaaattga

SEQ ID NO: 13852 - DNA, 21 bp, Homo sapiens
cagaatcctcyccttgcttct

SEQ ID NO: 13853 - DNA, 21 bp, Homo sapiens
tggtgcaaacrtacctagatt

SEQ ID NO: 13854 - DNA, 21 bp, Homo sapiens
actttccctayagcaagctgg

SEQ ID NO: 13855 - DNA, 21 bp, Homo sapiens
tacatacaccrtattgtgcta

SEQ ID NO: 13856 - DNA, 21 bp, Homo sapiens
aatgatggatrgagagaaact

SEQ ID NO: 13857 - DNA, 21 bp, Homo sapiens
ccaaaagcctrtgaacatcat

SEQ ID NO: 13858 - DNA, 21 bp, Homo sapiens
gagagcaaggygcctctgagc

SEQ ID NO: 13859 - DNA, 21 bp, Homo sapiens
attctgctctrtattaggcca

SEQ ID NO: 13860 - DNA, 21 bp, Homo sapiens
ttaactccaaygcacatcact

SEQ ID NO: 13861 - DNA, 21 bp, Homo sapiens
aaatctcctaytccagtggga

SEQ ID NO: 13862 - DNA, 21 bp, Homo sapiens
aatcccatcayggagagggcc

SEQ ID NO: 13863 - DNA, 21 bp, Homo sapiens
gctactaaackgtggtcctta

SEQ ID NO: 13864 - DNA, 21 bp, Homo sapiens
ctatggctaaygaatagaacc

SEQ ID NO: 13865 - DNA, 21 bp, Homo sapiens
cttcattgggmaaatcacatt

SEQ ID NO: 13866 - DNA, 21 bp, Homo sapiens
agacaaacctygataatgcaa

SEQ ID NO: 13867 - DNA, 21 bp, Homo sapiens
ctcctgtatcytatgccagcc

SEQ ID NO: 13868 - DNA, 21 bp, Homo sapiens
caggggcaccyatctaggtga

SEQ ID NO: 13869 - DNA, 21 bp, Homo sapiens
atggtaaacayagggccacgg

SEQ ID NO: 13870 - DNA, 21 bp, Homo sapiens
gttagctatgrctcagaattc

SEQ ID NO: 13871 - DNA, 21 bp, Homo sapiens
aactttgcaaygttactgtaa

SEQ ID NO: 13872 - DNA, 21 bp, Homo sapiens
ggggttgtagrtgtggcagtt

SEQ ID NO: 13873 - DNA, 21 bp, Homo sapiens
cccaaaatacrggtagtcagt

SEQ ID NO: 13874 - DNA, 21 bp, Homo sapiens
aagtttcagayagtggcagat

SEQ ID NO: 13875 - DNA, 21 bp, Homo sapiens
cactaccattkttcaatatct

SEQ ID NO: 13876 - DNA, 21 bp, Homo sapiens
tgctcctgttrattttagggc

SEQ ID NO: 13877 - DNA, 21 bp, Homo sapiens
ttacctttcargatatcccta

SEQ ID NO: 13878 - DNA, 21 bp, Homo sapiens
acataaaaacrggctggcttc

SEQ ID NO: 13879 - DNA, 21 bp, Homo sapiens
agtctctagayccactgcctg

SEQ ID NO: 13880 - DNA, 21 bp, Homo sapiens
ccaaaaagttktatgaaaagt

SEQ ID NO: 13881 - DNA, 21 bp, Homo sapiens
ctgaccatgayagccactaac

SEQ ID NO: 13882 - DNA, 21 bp, Homo sapiens
cgtgaaactaytttttagatg

SEQ ID NO: 13883 - DNA, 21 bp, Homo sapiens
ccaaagttttktactggaatt

SEQ ID NO: 13884 - DNA, 21 bp, Homo sapiens
tgcaggcagcrctactttgca

SEQ ID NO: 13885 - DNA, 21 bp, Homo sapiens
taatttttcaraaacacagcc

SEQ ID NO: 13886 - DNA, 21 bp, Homo sapiens
cggatttctcrgagaaactta

SEQ ID NO: 13887 - DNA, 21 bp, Homo sapiens
agggcttcttmttgggtgtag

SEQ ID NO: 13888 - DNA, 21 bp, Homo sapiens
ttgggtccttycacttaaaac

SEQ ID NO: 13889 - DNA, 21 bp, Homo sapiens
ttgcaaataaygccacattct

SEQ ID NO: 13890 - DNA, 21 bp, Homo sapiens
aagcatcatayggtgagagca

SEQ ID NO: 13891 - DNA, 21 bp, Homo sapiens
gctgttgtgcrttttcagaat

SEQ ID NO: 13892 - DNA, 21 bp, Homo sapiens
tttcatttatrttgggtgagg

SEQ ID NO: 13893 - DNA, 21 bp, Homo sapiens
ggattcgacartttttcacta

SEQ ID NO: 13894 - DNA, 21 bp, Homo sapiens
acctcacactrtatctcccaa

SEQ ID NO: 13895 - DNA, 21 bp, Homo sapiens
gataaaccacrttttactatc

SEQ ID NO: 13896 - DNA, 21 bp, Homo sapiens
ttcatagtagytctttgtcat

SEQ ID NO: 13897 - DNA, 21 bp, Homo sapiens
aaacaagagtkaaggctaccc

SEQ ID NO: 13898 - DNA, 21 bp, Homo sapiens
caaaaacaaartatgtttcta

SEQ ID NO: 13899 - DNA, 21 bp, Homo sapiens
gattcacgtartctgttttta

SEQ ID NO: 13900 - DNA, 21 bp, Homo sapiens
ctccctcattrgtgttatatt

SEQ ID NO: 13901 - DNA, 21 bp, Homo sapiens
tcctcattatrtaatttctaa

SEQ ID NO: 13902 - DNA, 21 bp, Homo sapiens
cagttgaataycactgaactt

SEQ ID NO: 13903 - DNA, 21 bp, Homo sapiens
gctccacttayggcaatctag

SEQ ID NO: 13904 - DNA, 21 bp, Homo sapiens
gcttacaaaartaagagcaag

SEQ ID NO: 13905 - DNA, 21 bp, Homo sapiens
cccatttagarttctcttgca

SEQ ID NO: 13906 - DNA, 21 bp, Homo sapiens
ttgattactckaggtacctca

SEQ ID NO: 13907 - DNA, 21 bp, Homo sapiens
tcttttacttmgttctgctgt

SEQ ID NO: 13908 - DNA, 21 bp, Homo sapiens
tatgaaagtgrgcaataaatt

SEQ ID NO: 13909 - DNA, 21 bp, Homo sapiens
ttgtccctacmtgcttctgta

SEQ ID NO: 13910 - DNA, 21 bp, Homo sapiens
cttccagttgkctaggtaaaa

SEQ ID NO: 13911 - DNA, 21 bp, Homo sapiens
tcagggcagayggtccccaag

SEQ ID NO: 13912 - DNA, 21 bp, Homo sapiens
gcctttgagcmagaagccagg

SEQ ID NO: 13913 - DNA, 21 bp, Homo sapiens
atagtttgtgktacttgttct

SEQ ID NO: 13914 - DNA, 21 bp, Homo sapiens
tggagttctayttttatctca

SEQ ID NO: 13915 - DNA, 21 bp, Homo sapiens
actaactgacrgagccattat

SEQ ID NO: 13916 - DNA, 21 bp, Homo sapiens
ctctattgagrtggactgaaa

SEQ ID NO: 13917 - DNA, 21 bp, Homo sapiens
aatgtctgatrtgctctcttg

SEQ ID NO: 13918 - DNA, 21 bp, Homo sapiens
tgtatctttaytaggaggaga

SEQ ID NO: 13919 - DNA, 21 bp, Homo sapiens
gggttgggcamatgatttaag

SEQ ID NO: 13920 - DNA, 21 bp, Homo sapiens
atctccctttrcaacaaagag

SEQ ID NO: 13921 - DNA, 21 bp, Homo sapiens
gtagttttgaygacacaaagt

SEQ ID NO: 13922 - DNA, 21 bp, Homo sapiens
ggcataggacrtcaatctgtc

SEQ ID NO: 13923 - DNA, 21 bp, Homo sapiens
tatttgttgartgagtatgag

SEQ ID NO: 13924 - DNA, 21 bp, Homo sapiens
ccccagggttrtatgcaaaac

SEQ ID NO: 13925 - DNA, 21 bp, Homo sapiens
cccagaatatmacatttaggt

SEQ ID NO: 13926 - DNA, 21 bp, Homo sapiens
tccttttgggygctttttcag

SEQ ID NO: 13927 - DNA, 21 bp, Homo sapiens
ggaacacataytgcgtcagat

SEQ ID NO: 13928 - DNA, 21 bp, Homo sapiens
tgagagtgacmataacagctg

SEQ ID NO: 13929 - DNA, 21 bp, Homo sapiens
gtagtgacaaragagaggagt

SEQ ID NO: 13930 - DNA, 21 bp, Homo sapiens
caaaacttgcrgtaagtttgg

SEQ ID NO: 13931 - DNA, 21 bp, Homo sapiens
ttacaaaataycctgtcttgg

SEQ ID NO: 13932 - DNA, 21 bp, Homo sapiens
taaaatatttyaacatttttt

SEQ ID NO: 13933 - DNA, 21 bp, Homo sapiens
agctcctttcrtcttctccta

SEQ ID NO: 13934 - DNA, 21 bp, Homo sapiens
ttttgttctayagcacctgtt

SEQ ID NO: 13935 - DNA, 21 bp, Homo sapiens
cattttgaaarattaatacat

SEQ ID NO: 13936 - DNA, 21 bp, Homo sapiens
aagtaaccgcrggtagcacag

SEQ ID NO: 13937 - DNA, 21 bp, Homo sapiens
taatttactcrttaaaatgta

SEQ ID NO: 13938 - DNA, 21 bp, Homo sapiens
tgtttttttaytgatagtgcc

SEQ ID NO: 13939 - DNA, 21 bp, Homo sapiens
aaggctagatraaattattca

SEQ ID NO: 13940 - DNA, 21 bp, Homo sapiens
agatggttggyttaagaactt

SEQ ID NO: 13941 - DNA, 21 bp, Homo sapiens
gcaattactayataccaggca

SEQ ID NO: 13942 - DNA, 21 bp, Homo sapiens
cctcgaacccrtatggtgctt

SEQ ID NO: 13943 - DNA, 21 bp, Homo sapiens
gaaggtcagcyctgtcggtga

SEQ ID NO: 13944 - DNA, 21 bp, Homo sapiens
atctaatgctratagactgag

SEQ ID NO: 13945 - DNA, 21 bp, Homo sapiens
tacctcaacayacacacaagc

SEQ ID NO: 13946 - DNA, 21 bp, Homo sapiens
taatactgcaracctgttttc

SEQ ID NO: 13947 - DNA, 21 bp, Homo sapiens
tcagaagcccrcccccttcct

SEQ ID NO: 13948 - DNA, 21 bp, Homo sapiens
aacccaccaaytattaattca

SEQ ID NO: 13949 - DNA, 21 bp, Homo sapiens
ttaaccatcayaacctccctg

SEQ ID NO: 13950 - DNA, 21 bp, Homo sapiens
ttcttcttcartgttgtgaga

SEQ ID NO: 13951 - DNA, 21 bp, Homo sapiens
tttaaaatcarttcaaaaaac

SEQ ID NO: 13952 - DNA, 21 bp, Homo sapiens
tctagttttaygctattatgg

SEQ ID NO: 13953 - DNA, 21 bp, Homo sapiens
aaatgaaaagrtgttgatcac

SEQ ID NO: 13954 - DNA, 21 bp, Homo sapiens
gtctgcgtgtytggaatggcc

SEQ ID NO: 13955 - DNA, 21 bp, Homo sapiens
tgaatacgagrgcagtgatat

SEQ ID NO: 13956 - DNA, 21 bp, Homo sapiens
tcacttcaacmaatcccttct

SEQ ID NO: 13957 - DNA, 21 bp, Homo sapiens
agattttatamgtaatttgca

SEQ ID NO: 13958 - DNA, 21 bp, Homo sapiens
gcttaaaatckcaccctgcat

SEQ ID NO: 13959 - DNA, 21 bp, Homo sapiens
gccacttcatycctggtccag

SEQ ID NO: 13960 - DNA, 21 bp, Homo sapiens
aaaaggtgaayccttaaaaaa

SEQ ID NO: 13961 - DNA, 21 bp, Homo sapiens
gtcttccagcrgaaaccactg

SEQ ID NO: 13962 - DNA, 21 bp, Homo sapiens
atgataggctytcagagattt

SEQ ID NO: 13963 - DNA, 21 bp, Homo sapiens
tgaaggctaaygctttgcttt

SEQ ID NO: 13964 - DNA, 21 bp, Homo sapiens
cttcttttccycatgcatgaa

SEQ ID NO: 13965 - DNA, 21 bp, Homo sapiens
taggaaaggtrggcttgtttc

SEQ ID NO: 13966 - DNA, 21 bp, Homo sapiens
tcatccaacayttgcatagga

SEQ ID NO: 13967 - DNA, 21 bp, Homo sapiens
catgagtttgrgagtctttga

SEQ ID NO: 13968 - DNA, 21 bp, Homo sapiens
taattagccartgaagtggag

SEQ ID NO: 13969 - DNA, 21 bp, Homo sapiens
tctctaaattrttcctctgtg

SEQ ID NO: 13970 - DNA, 21 bp, Homo sapiens
gaagaaccttrtgtgtgtcaa

SEQ ID NO: 13971 - DNA, 21 bp, Homo sapiens
catgctcttayggtttcattc

SEQ ID NO: 13972 - DNA, 21 bp, Homo sapiens
ccctccctccytcagagtgtg

SEQ ID NO: 13973 - DNA, 21 bp, Homo sapiens
agtttaggctygtcagttttg

SEQ ID NO: 13974 - DNA, 21 bp, Homo sapiens
tttactccacragagaagctc

SEQ ID NO: 13975 - DNA, 21 bp, Homo sapiens
ttggttggctyggaccagccc

SEQ ID NO: 13976 - DNA, 21 bp, Homo sapiens
tacagccattmacttttgctc

SEQ ID NO: 13977 - DNA, 21 bp, Homo sapiens
gccttcccccrtcggaggccc

SEQ ID NO: 13978 - DNA, 21 bp, Homo sapiens
aggcagtacarcattctggtg

SEQ ID NO: 13979 - DNA, 21 bp, Homo sapiens
agcttctgtaycccgggaccc

SEQ ID NO: 13980 - DNA, 21 bp, Homo sapiens
aaagtaataamggtgaacatg

SEQ ID NO: 13981 - DNA, 21 bp, Homo sapiens
gcgacctgatkcgctgtgcgg

SEQ ID NO: 13982 - DNA, 21 bp, Homo sapiens
atgatgctttytgttacagat

SEQ ID NO: 13983 - DNA, 21 bp, Homo sapiens
gcaccatagakgaagggtgga

SEQ ID NO: 13984 - DNA, 21 bp, Homo sapiens
gctcacttctrgcaagcgctc

SEQ ID NO: 13985 - DNA, 21 bp, Homo sapiens
acttcctgtcrcacttagaat

SEQ ID NO: 13986 - DNA, 21 bp, Homo sapiens
gtgggcatgarcttccgaggg

SEQ ID NO: 13987 - DNA, 21 bp, Homo sapiens
tgtacccacaraaattgaagt

SEQ ID NO: 13988 - DNA, 21 bp, Homo sapiens
gtgattcagaygagggatgac

SEQ ID NO: 13989 - DNA, 21 bp, Homo sapiens
gagccaagggktgctgaacct

SEQ ID NO: 13990 - DNA, 21 bp, Homo sapiens
agagaaggaarctaaaaaaaa

SEQ ID NO: 13991 - DNA, 21 bp, Homo sapiens
taacctgaatrgagatctcaa

SEQ ID NO: 13992 - DNA, 21 bp, Homo sapiens
aagctttgacracattaccct

SEQ ID NO: 13993 - DNA, 21 bp, Homo sapiens
atggaagaatyggactctagg

SEQ ID NO: 13994 - DNA, 21 bp, Homo sapiens
tttctctctgrtgtcaaagat

SEQ ID NO: 13995 - DNA, 21 bp, Homo sapiens
cttgttgtgakgcaggttgtc

SEQ ID NO: 13996 - DNA, 21 bp, Homo sapiens
tttttttggcrttccatgttt

SEQ ID NO: 13997 - DNA, 21 bp, Homo sapiens
aaattttagtygtatgtaatt

SEQ ID NO: 13998 - DNA, 21 bp, Homo sapiens
tagtctctctyatgattctga

SEQ ID NO: 13999 - DNA, 21 bp, Homo sapiens
ttttgcatttracctatgtga

SEQ ID NO: 14000 - DNA, 21 bp, Homo sapiens
ataatctttgratgagtgtgt

SEQ ID NO: 14001 - DNA, 21 bp, Homo sapiens
gtgccgagaarcatttctctt

SEQ ID NO: 14002 - DNA, 21 bp, Homo sapiens
tttttttctakttttcctcct

SEQ ID NO: 14003 - DNA, 21 bp, Homo sapiens
agctgaaaaartaagggagct

SEQ ID NO: 14004 - DNA, 21 bp, Homo sapiens
tagcccggaargctgtacagc

SEQ ID NO: 14005 - DNA, 21 bp, Homo sapiens
ttatcctaaaycctctctgca

SEQ ID NO: 14006 - DNA, 21 bp, Homo sapiens
actaattatayaaaatcttag

SEQ ID NO: 14007 - DNA, 21 bp, Homo sapiens
ctcttacttaygcaacaaact

SEQ ID NO: 14008 - DNA, 21 bp, Homo sapiens
aagagaacccygctcctcatc

SEQ ID NO: 14009 - DNA, 21 bp, Homo sapiens
tacaggagagyagatctataa

SEQ ID NO: 14010 - DNA, 21 bp, Homo sapiens
atgacaaataygacttttaca

SEQ ID NO: 14011 - DNA, 21 bp, Homo sapiens
tgtccctcaamagggccaagc

SEQ ID NO: 14012 - DNA, 21 bp, Homo sapiens
ggtaaaatatrtataaaacat

SEQ ID NO: 14013 - DNA, 21 bp, Homo sapiens
gaggaatgttrattctaagga

SEQ ID NO: 14014 - DNA, 21 bp, Homo sapiens
atgatgtatamatattagttt

SEQ ID NO: 14015 - DNA, 21 bp, Homo sapiens
cttttctcacmttcttgatgg

SEQ ID NO: 14016 - DNA, 21 bp, Homo sapiens
tttaattgtcrtgactgagtt

SEQ ID NO: 14017 - DNA, 21 bp, Homo sapiens
aacaaattgtrttgcttgatt

SEQ ID NO: 14018 - DNA, 21 bp, Homo sapiens
gcatctgaacmcttgcagctg

SEQ ID NO: 14019 - DNA, 21 bp, Homo sapiens
gtatgtatacrtgtcacattt

SEQ ID NO: 14020 - DNA, 21 bp, Homo sapiens
cctgcactgarttctaccaag

SEQ ID NO: 14021 - DNA, 21 bp, Homo sapiens
tatgtgttctragcacattgc

SEQ ID NO: 14022 - DNA, 21 bp, Homo sapiens
taatgcttttygaaacttaca

SEQ ID NO: 14023 - DNA, 21 bp, Homo sapiens
taatttgtcayaaaagaagtg

SEQ ID NO: 14024 - DNA, 21 bp, Homo sapiens
acccagcttayagacacaaac

SEQ ID NO: 14025 - DNA, 21 bp, Homo sapiens
gaatgagggarggtgacccag

SEQ ID NO: 14026 - DNA, 21 bp, Homo sapiens
attcatcattkatttatttaa

SEQ ID NO: 14027 - DNA, 21 bp, Homo sapiens
tttgtaaatgygttttattta

SEQ ID NO: 14028 - DNA, 21 bp, Homo sapiens
tagagttagcktttccttttg

SEQ ID NO: 14029 - DNA, 21 bp, Homo sapiens
ttacacacctrtaccatcatt

SEQ ID NO: 14030 - DNA, 21 bp, Homo sapiens
agcctggggaragaaaagaaa

SEQ ID NO: 14031 - DNA, 21 bp, Homo sapiens
cagtgttctcyctgtgtttct

SEQ ID NO: 14032 - DNA, 21 bp, Homo sapiens
gtcctataccrtacaaaatat

SEQ ID NO: 14033 - DNA, 21 bp, Homo sapiens
tgcatatcatrtatccagacc

SEQ ID NO: 14034 - DNA, 21 bp, Homo sapiens
accaaggaacrctgtcttact

SEQ ID NO: 14035 - DNA, 21 bp, Homo sapiens
ccataaggaamgatctacttt

SEQ ID NO: 14036 - DNA, 21 bp, Homo sapiens
ggaattgtgaycctgcttctg

SEQ ID NO: 14037 - DNA, 21 bp, Homo sapiens
ggcagaggtarggaaagtaaa

SEQ ID NO: 14038 - DNA, 21 bp, Homo sapiens
atcctgtgctrtgaagtactg

SEQ ID NO: 14039 - DNA, 21 bp, Homo sapiens
gttaaaataaygataacaata

SEQ ID NO: 14040 - DNA, 21 bp, Homo sapiens
aattaaacagmtatccaataa

SEQ ID NO: 14041 - DNA, 21 bp, Homo sapiens
atgtttgaacraaaataaaat

SEQ ID NO: 14042 - DNA, 21 bp, Homo sapiens
tagacaacgckgcagtctcca

SEQ ID NO: 14043 - DNA, 21 bp, Homo sapiens
tcaagaaaagycttccagctg

SEQ ID NO: 14044 - DNA, 21 bp, Homo sapiens
aggaagagttrtgggaggaag

SEQ ID NO: 14045 - DNA, 21 bp, Homo sapiens
aatctctgaayacagggaaat

SEQ ID NO: 14046 - DNA, 21 bp, Homo sapiens
taaatcacatrtctccacttc

SEQ ID NO: 14047 - DNA, 21 bp, Homo sapiens
ttgatggctaygtccttataa

SEQ ID NO: 14048 - DNA, 21 bp, Homo sapiens
tcagacgtagyagataagacc

SEQ ID NO: 14049 - DNA, 21 bp, Homo sapiens
aaaaaaccccrtaaaccgttg

SEQ ID NO: 14050 - DNA, 21 bp, Homo sapiens
ctcatctttcmaattcctcag

SEQ ID NO: 14051 - DNA, 21 bp, Homo sapiens
atgaggctgtrcactatttac

SEQ ID NO: 14052 - DNA, 21 bp, Homo sapiens
aagagggatartatagatatg

SEQ ID NO: 14053 - DNA, 21 bp, Homo sapiens
actttgatctygttactctct

SEQ ID NO: 14054 - DNA, 21 bp, Homo sapiens
atttctataayttttacattt

SEQ ID NO: 14055 - DNA, 21 bp, Homo sapiens
catgatcaacyattataatca

SEQ ID NO: 14056 - DNA, 21 bp, Homo sapiens
gtgatttataygaagaatttg

SEQ ID NO: 14057 - DNA, 21 bp, Homo sapiens
gtccattaagrgtgtgttaga

SEQ ID NO: 14058 - DNA, 21 bp, Homo sapiens
cttacttctcrtttaatatcc

SEQ ID NO: 14059 - DNA, 21 bp, Homo sapiens
atccttttagkttatgtcctt

SEQ ID NO: 14060 - DNA, 21 bp, Homo sapiens
atattcaggarcattgtagag

SEQ ID NO: 14061 - DNA, 21 bp, Homo sapiens
gttgaactacygttaggcaga

SEQ ID NO: 14062 - DNA, 21 bp, Homo sapiens
atatttggatkacgtctactc

SEQ ID NO: 14063 - DNA, 21 bp, Homo sapiens
ccaagaagagmcaaggtttta

SEQ ID NO: 14064 - DNA, 21 bp, Homo sapiens
aaggtgccagytcttctctgt

SEQ ID NO: 14065 - DNA, 21 bp, Homo sapiens
aaaaactaagrattgagcggt

SEQ ID NO: 14066 - DNA, 21 bp, Homo sapiens
gcaagatcaaygattaatacc

SEQ ID NO: 14067 - DNA, 21 bp, Homo sapiens
gccacttaatrgtagttaatg

SEQ ID NO: 14068 - DNA, 21 bp, Homo sapiens
aattcaaagcmatttggcacc

SEQ ID NO: 14069 - DNA, 21 bp, Homo sapiens
ctcacaatctrtgtcgttatg

SEQ ID NO: 14070 - DNA, 21 bp, Homo sapiens
gcagcaagaaygacccaaata

SEQ ID NO: 14071 - DNA, 21 bp, Homo sapiens
atattaatcartttcatcaag

SEQ ID NO: 14072 - DNA, 21 bp, Homo sapiens
tttcttcagaygataaatctg

SEQ ID NO: 14073 - DNA, 21 bp, Homo sapiens
gaccctcataygcactattta

SEQ ID NO: 14074 - DNA, 21 bp, Homo sapiens
ttttctattcyccatttttaa

SEQ ID NO: 14075 - DNA, 21 bp, Homo sapiens
atgatatactktacactgtat

SEQ ID NO: 14076 - DNA, 21 bp, Homo sapiens
tactggcatgraaactgagaa

SEQ ID NO: 14077 - DNA, 21 bp, Homo sapiens
aagacagccgytttagctgtt

SEQ ID NO: 14078 - DNA, 21 bp, Homo sapiens
cattgcttacrtttccagggc

SEQ ID NO: 14079 - DNA, 21 bp, Homo sapiens
tcattcccacyatgattccct

SEQ ID NO: 14080 - DNA, 21 bp, Homo sapiens
gactgctctcrttaccaccat

SEQ ID NO: 14081 - DNA, 21 bp, Homo sapiens
tgcattcctaytcacatggat

SEQ ID NO: 14082 - DNA, 21 bp, Homo sapiens
atgggatcacmggggaggaga

SEQ ID NO: 14083 - DNA, 21 bp, Homo sapiens
gctagggatamccctaagtcc

SEQ ID NO: 14084 - DNA, 21 bp, Homo sapiens
ctttttttttyctcaattttt

SEQ ID NO: 14085 - DNA, 21 bp, Homo sapiens
ataaactcttmtgagcatctt

SEQ ID NO: 14086 - DNA, 21 bp, Homo sapiens
agataatgacrccccaaaata

SEQ ID NO: 14087 - DNA, 21 bp, Homo sapiens
ttcagctccayattttcttca

SEQ ID NO: 14088 - DNA, 21 bp, Homo sapiens
tgttttggtgyaacaatttag

SEQ ID NO: 14089 - DNA, 21 bp, Homo sapiens
attgaggctcyctgaaaaaac

SEQ ID NO: 14090 - DNA, 21 bp, Homo sapiens
atgatatttcrgtgtaattgt

SEQ ID NO: 14091 - DNA, 21 bp, Homo sapiens
gccttctacaygtctttgttt

SEQ ID NO: 14092 - DNA, 21 bp, Homo sapiens
cgtggaacaaygtaagttctg

SEQ ID NO: 14093 - DNA, 21 bp, Homo sapiens
agtgaccctgrtctttcctag

SEQ ID NO: 14094 - DNA, 21 bp, Homo sapiens
gcctgctatcrgtttaagatt

SEQ ID NO: 14095 - DNA, 21 bp, Homo sapiens
tcatagcagtrcttgtctcat

SEQ ID NO: 14096 - DNA, 21 bp, Homo sapiens
acttggacaaraggtaggatt

SEQ ID NO: 14097 - DNA, 21 bp, Homo sapiens
ccacagataarcattggctct

SEQ ID NO: 14098 - DNA, 21 bp, Homo sapiens
aaaccaacaaygggaataatg

SEQ ID NO: 14099 - DNA, 21 bp, Homo sapiens
gtgcagaaagyaaattgataa

SEQ ID NO: 14100 - DNA, 21 bp, Homo sapiens
tcccttaagcmcattcaaaca

SEQ ID NO: 14101 - DNA, 21 bp, Homo sapiens
ttgttgaaggmctttctttat

SEQ ID NO: 14102 - DNA, 21 bp, Homo sapiens
caagaaagacrtagcaagttg

SEQ ID NO: 14103 - DNA, 21 bp, Homo sapiens
acaaggttgtyacagtcagaa

SEQ ID NO: 14104 - DNA, 21 bp, Homo sapiens
cctccaatccyagtctccaaa

SEQ ID NO: 14105 - DNA, 21 bp, Homo sapiens
cactatccatkttatatatgt

SEQ ID NO: 14106 - DNA, 21 bp, Homo sapiens
gaaaaatgcaygggcaggtaa

SEQ ID NO: 14107 - DNA, 21 bp, Homo sapiens
aaccaaacacrttccccatac

SEQ ID NO: 14108 - DNA, 21 bp, Homo sapiens
aatgcccaacrtttcaaatct

SEQ ID NO: 14109 - DNA, 21 bp, Homo sapiens
agtagtgaaargttgtgcaga

SEQ ID NO: 14110 - DNA, 21 bp, Homo sapiens
ttggggctcgrtttttgctta

SEQ ID NO: 14111 - DNA, 21 bp, Homo sapiens
tcctcaagaartgagtcagtt

SEQ ID NO: 14112 - DNA, 21 bp, Homo sapiens
tgacaaggatrtagaacaaca

SEQ ID NO: 14113 - DNA, 21 bp, Homo sapiens
gagccatttcktttccgctga

SEQ ID NO: 14114 - DNA, 21 bp, Homo sapiens
tcgttcattcrataggtagag

SEQ ID NO: 14115 - DNA, 21 bp, Homo sapiens
ttcttaacaartgctagagga

SEQ ID NO: 14116 - DNA, 21 bp, Homo sapiens
gattaatgaaraataaaggat

SEQ ID NO: 14117 - DNA, 21 bp, Homo sapiens
aatgatgtcaragttttctta

SEQ ID NO: 14118 - DNA, 21 bp, Homo sapiens
aactaaggttyaggcaaataa

SEQ ID NO: 14119 - DNA, 21 bp, Homo sapiens
tagcagtgatktgtgtgtgtg

SEQ ID NO: 14120 - DNA, 21 bp, Homo sapiens
tgatttgtttkgagtcaagtt

SEQ ID NO: 14121 - DNA, 21 bp, Homo sapiens
ctaagtcttcmaatcatttcc

SEQ ID NO: 14122 - DNA, 21 bp, Homo sapiens
ttagcacccarccctcttttt

SEQ ID NO: 14123 - DNA, 21 bp, Homo sapiens
agaaagaacamagtaggcaaa

SEQ ID NO: 14124 - DNA, 21 bp, Homo sapiens
aatgtcatgtrccttaagcaa

SEQ ID NO: 14125 - DNA, 21 bp, Homo sapiens
ccaaagctaaytgtcatctaa

SEQ ID NO: 14126 - DNA, 21 bp, Homo sapiens
cagacgcaggrtgaatcattc

SEQ ID NO: 14127 - DNA, 21 bp, Homo sapiens
atagaggagtytggactgcaa

SEQ ID NO: 14128 - DNA, 21 bp, Homo sapiens
aaggaggtgtyattaggaggt

SEQ ID NO: 14129 - DNA, 21 bp, Homo sapiens
ccttatgcccrtatgtgttta

SEQ ID NO: 14130 - DNA, 21 bp, Homo sapiens
agtgcttttcmttcctttatg

SEQ ID NO: 14131 - DNA, 21 bp, Homo sapiens
cttctgccttmagactttctt

SEQ ID NO: 14132 - DNA, 21 bp, Homo sapiens
aaggcaggcakacaatgcagg

SEQ ID NO: 14133 - DNA, 21 bp, Homo sapiens
cagcatcatamacttttaagg

SEQ ID NO: 14134 - DNA, 21 bp, Homo sapiens
aagccttaacrtgtgcagcac

SEQ ID NO: 14135 - DNA, 21 bp, Homo sapiens
tgttcaaataraattgtaaac

SEQ ID NO: 14136 - DNA, 21 bp, Homo sapiens
tctaatgacartctaagtcat

SEQ ID NO: 14137 - DNA, 21 bp, Homo sapiens
ggatagcccartatttcctta

SEQ ID NO: 14138 - DNA, 21 bp, Homo sapiens
aatctcaaacrggctgcgagg

SEQ ID NO: 14139 - DNA, 21 bp, Homo sapiens
ttttccctacrggtaacatcc

SEQ ID NO: 14140 - DNA, 21 bp, Homo sapiens
aaatcctcaarttagaaagtg

SEQ ID NO: 14141 - DNA, 21 bp, Homo sapiens
tgtaatctctytgagcttcct

SEQ ID NO: 14142 - DNA, 21 bp, Homo sapiens
acatgggtggrcagattttat

SEQ ID NO: 14143 - DNA, 21 bp, Homo sapiens
ctactactacyttctattttc

SEQ ID NO: 14144 - DNA, 21 bp, Homo sapiens
cggaactctaytgactagttc

SEQ ID NO: 14145 - DNA, 21 bp, Homo sapiens
tccctttcctyactaaagctt

SEQ ID NO: 14146 - DNA, 21 bp, Homo sapiens
gtattatctgyccttcctgct

SEQ ID NO: 14147 - DNA, 21 bp, Homo sapiens
tgcctttaacmttttcctagg

SEQ ID NO: 14148 - DNA, 21 bp, Homo sapiens
attattttttyctatttctgc

SEQ ID NO: 14149 - DNA, 21 bp, Homo sapiens
tggaggaaatrtctactgggt

SEQ ID NO: 14150 - DNA, 21 bp, Homo sapiens
acaaagaagayataaataata

SEQ ID NO: 14151 - DNA, 21 bp, Homo sapiens
gaaggactgcytgccaaacct

SEQ ID NO: 14152 - DNA, 21 bp, Homo sapiens
ggactgtcacygtaaagacct

SEQ ID NO: 14153 - DNA, 21 bp, Homo sapiens
ggcatgccaamtgaagctgtt

SEQ ID NO: 14154 - DNA, 21 bp, Homo sapiens
tgagagaaatmtggatgccaa

SEQ ID NO: 14155 - DNA, 21 bp, Homo sapiens
acagtgggccrtttgtagcac

SEQ ID NO: 14156 - DNA, 21 bp, Homo sapiens
tccagcaagarctatatatga

SEQ ID NO: 14157 - DNA, 21 bp, Homo sapiens
ccttccagttrcacctcaggc

SEQ ID NO: 14158 - DNA, 21 bp, Homo sapiens
tagcatgctarccaaacactg

SEQ ID NO: 14159 - DNA, 21 bp, Homo sapiens
tggagagaaaygagcatcaac

SEQ ID NO: 14160 - DNA, 21 bp, Homo sapiens
gctttagtgayatggctgtaa

SEQ ID NO: 14161 - DNA, 21 bp, Homo sapiens
cactctgcagrcttcactttc

SEQ ID NO: 14162 - DNA, 21 bp, Homo sapiens
atttttacctkgaatttaaag

SEQ ID NO: 14163 - DNA, 21 bp, Homo sapiens
tcctatgttayggctgctggg

SEQ ID NO: 14164 - DNA, 21 bp, Homo sapiens
atatatagacragggggaaag

SEQ ID NO: 14165 - DNA, 21 bp, Homo sapiens
tctgacattaytcaagaaaaa

SEQ ID NO: 14166 - DNA, 21 bp, Homo sapiens
tgatacatttkgagtttgtct

SEQ ID NO: 14167 - DNA, 21 bp, Homo sapiens
gtcaaatgttrtcttatgctg

SEQ ID NO: 14168 - DNA, 21 bp, Homo sapiens
gttggaaggcraggaaactaa

SEQ ID NO: 14169 - DNA, 21 bp, Homo sapiens
tagactgtacyctctttaagg

SEQ ID NO: 14170 - DNA, 21 bp, Homo sapiens
acattttagtrttagatgaat

SEQ ID NO: 14171 - DNA, 21 bp, Homo sapiens
ctagtggaacrgatgcaagca

SEQ ID NO: 14172 - DNA, 21 bp, Homo sapiens
ataaaatcctyccgtaaaagt

SEQ ID NO: 14173 - DNA, 21 bp, Homo sapiens
acaaaacaagraaacacttat

SEQ ID NO: 14174 - DNA, 21 bp, Homo sapiens
aagcttcattytaacaaaatc

SEQ ID NO: 14175 - DNA, 21 bp, Homo sapiens
ccgccccgtckgcccctggtc

SEQ ID NO: 14176 - DNA, 21 bp, Homo sapiens
actgctttttktctacctctg

SEQ ID NO: 14177 - DNA, 21 bp, Homo sapiens
ttatgtccacmtgccagttta

SEQ ID NO: 14178 - DNA, 21 bp, Homo sapiens
cagggtgaggrtgaaggtttg

SEQ ID NO: 14179 - DNA, 21 bp, Homo sapiens
acaaagaagcyaggagggcaa

SEQ ID NO: 14180 - DNA, 21 bp, Homo sapiens
tgcttaacatytctgagtctt

SEQ ID NO: 14181 - DNA, 21 bp, Homo sapiens
gggtagacacraaagccctgc

SEQ ID NO: 14182 - DNA, 21 bp, Homo sapiens
accctattcaracatgacatc

SEQ ID NO: 14183 - DNA, 21 bp, Homo sapiens
gcagagtaagrcttgtgtaca

SEQ ID NO: 14184 - DNA, 21 bp, Homo sapiens
atactcccgaytcatttattt

SEQ ID NO: 14185 - DNA, 21 bp, Homo sapiens
atccctctggyccttactggc

SEQ ID NO: 14186 - DNA, 21 bp, Homo sapiens
ggagaacaccygcagctggaa

SEQ ID NO: 14187 - DNA, 21 bp, Homo sapiens
gacagccctgygaagctgagt

SEQ ID NO: 14188 - DNA, 21 bp, Homo sapiens
atgaagccttkcacataaaga

SEQ ID NO: 14189 - DNA, 21 bp, Homo sapiens
gtacctgagtrtatttcacca

SEQ ID NO: 14190 - DNA, 21 bp, Homo sapiens
cgtgaatcccyttcagagggt

SEQ ID NO: 14191 - DNA, 21 bp, Homo sapiens
attcagatggygccacatggc

SEQ ID NO: 14192 - DNA, 21 bp, Homo sapiens
gcagcggggcratcaactgaa

SEQ ID NO: 14193 - DNA, 21 bp, Homo sapiens
cagcatttccratagagcgtg

SEQ ID NO: 14194 - DNA, 21 bp, Homo sapiens
gcttgatcccrtggaaaaaga

SEQ ID NO: 14195 - DNA, 21 bp, Homo sapiens
gacaggcactrgcggtgttgt

SEQ ID NO: 14196 - DNA, 21 bp, Homo sapiens
ttgtgaatgcytgtgactgtc

SEQ ID NO: 14197 - DNA, 21 bp, Homo sapiens
aatcaactgcytgagactggc

SEQ ID NO: 14198 - DNA, 21 bp, Homo sapiens
aaaggatagtyataggcatgt

SEQ ID NO: 14199 - DNA, 21 bp, Homo sapiens
ttgtttcttcmccgcattcct

SEQ ID NO: 14200 - DNA, 21 bp, Homo sapiens
gaggggcaacygtagacgtgt

SEQ ID NO: 14201 - DNA, 21 bp, Homo sapiens
cccaggacagractgtttcat

SEQ ID NO: 14202 - DNA, 21 bp, Homo sapiens
agcaccacagkgttggctgtt

SEQ ID NO: 14203 - DNA, 21 bp, Homo sapiens
ttatccatagratcatttcct

SEQ ID NO: 14204 - DNA, 21 bp, Homo sapiens
cacccagccayattagcaaaa

SEQ ID NO: 14205 - DNA, 21 bp, Homo sapiens
cacagttggtrttcctggcaa

SEQ ID NO: 14206 - DNA, 21 bp, Homo sapiens
cactgagcacytgaggttccc

SEQ ID NO: 14207 - DNA, 21 bp, Homo sapiens
ccaaaaacatyacgctgggaa

SEQ ID NO: 14208 - DNA, 21 bp, Homo sapiens
atataagttgratggttacat

SEQ ID NO: 14209 - DNA, 21 bp, Homo sapiens
ggcaaggaacrcttcagtgct

SEQ ID NO: 14210 - DNA, 21 bp, Homo sapiens
agaaggggcamatttctgtct

SEQ ID NO: 14211 - DNA, 21 bp, Homo sapiens
actgtaaaacmataacagaaa

SEQ ID NO: 14212 - DNA, 21 bp, Homo sapiens
tcatttcctgraagagcccac

SEQ ID NO: 14213 - DNA, 21 bp, Homo sapiens
gtttccctctygtgggctcct

SEQ ID NO: 14214 - DNA, 21 bp, Homo sapiens
ctattctcttrtgtggataca

SEQ ID NO: 14215 - DNA, 21 bp, Homo sapiens
tatatattcartagggtctga

SEQ ID NO: 14216 - DNA, 21 bp, Homo sapiens
atccctagtaktgggagcaga

SEQ ID NO: 14217 - DNA, 21 bp, Homo sapiens
aaggaaatatygctgtgatat

SEQ ID NO: 14218 - DNA, 21 bp, Homo sapiens
gctctgccacrcacagcatgt

SEQ ID NO: 14219 - DNA, 21 bp, Homo sapiens
aggcatggttrtgggatgaaa

SEQ ID NO: 14220 - DNA, 21 bp, Homo sapiens
gctcactggcycccagtcatg

SEQ ID NO: 14221 - DNA, 21 bp, Homo sapiens
gggacaagaarcccctaagct

SEQ ID NO: 14222 - DNA, 21 bp, Homo sapiens
cttgtggtctmtaacattcct

SEQ ID NO: 14223 - DNA, 21 bp, Homo sapiens
acacctgggartgatgtgacc

SEQ ID NO: 14224 - DNA, 21 bp, Homo sapiens
gtgtcatcgtyggccaccctc

SEQ ID NO: 14225 - DNA, 21 bp, Homo sapiens
ctctggacacrgtcaaggtac

SEQ ID NO: 14226 - DNA, 21 bp, Homo sapiens
acccagtccartctggggcat

SEQ ID NO: 14227 - DNA, 21 bp, Homo sapiens
tgaagaccatmtggatagaaa

SEQ ID NO: 14228 - DNA, 21 bp, Homo sapiens
aatagaagtayagtgggtaga

SEQ ID NO: 14229 - DNA, 21 bp, Homo sapiens
gcagatgcaartgacccaggc

SEQ ID NO: 14230 - DNA, 21 bp, Homo sapiens
gttgggacacrtaagtatggc

SEQ ID NO: 14231 - DNA, 21 bp, Homo sapiens
gtgcctgagayattttgtgaa

SEQ ID NO: 14232 - DNA, 21 bp, Homo sapiens
gaagaagatgrcctccccaaa

SEQ ID NO: 14233 - DNA, 21 bp, Homo sapiens
tatgttgaatygataaattta

SEQ ID NO: 14234 - DNA, 21 bp, Homo sapiens
caccctcaaakaagcaaatcc

SEQ ID NO: 14235 - DNA, 21 bp, Homo sapiens
tggttcattcrtgaaccagca

SEQ ID NO: 14236 - DNA, 21 bp, Homo sapiens
taacagcaccrtgcaattttc

SEQ ID NO: 14237 - DNA, 21 bp, Homo sapiens
aaatggccttktttattcaca

SEQ ID NO: 14238 - DNA, 21 bp, Homo sapiens
agtgatggaamtgaagcacat

SEQ ID NO: 14239 - DNA, 21 bp, Homo sapiens
tgggatttacytaaagtcata

SEQ ID NO: 14240 - DNA, 21 bp, Homo sapiens
ctgttgcttargtttggctga

SEQ ID NO: 14241 - DNA, 21 bp, Homo sapiens
ttcagtgcctrcaacatagta

SEQ ID NO: 14242 - DNA, 21 bp, Homo sapiens
ttcatcaaaaratgggcatgc

SEQ ID NO: 14243 - DNA, 21 bp, Homo sapiens
tggagtccctraccttctgcc

SEQ ID NO: 14244 - DNA, 21 bp, Homo sapiens
tacccccaccycagcttattt

SEQ ID NO: 14245 - DNA, 21 bp, Homo sapiens
tcagagcagartgccatcact

SEQ ID NO: 14246 - DNA, 21 bp, Homo sapiens
taagggaacaytaaagattgg

SEQ ID NO: 14247 - DNA, 21 bp, Homo sapiens
acattactccrgcagtctcaa

SEQ ID NO: 14248 - DNA, 21 bp, Homo sapiens
aatcttcacarcaatgccact

SEQ ID NO: 14249 - DNA, 21 bp, Homo sapiens
aatttgtgaakcccaagctct

SEQ ID NO: 14250 - DNA, 21 bp, Homo sapiens
accatttttaygtacttatga

SEQ ID NO: 14251 - DNA, 21 bp, Homo sapiens
taaggccatcrgtggatcatg

SEQ ID NO: 14252 - DNA, 21 bp, Homo sapiens
actattgcttrtcaagaagcc

SEQ ID NO: 14253 - DNA, 21 bp, Homo sapiens
atagaataaaragagaatgga

SEQ ID NO: 14254 - DNA, 21 bp, Homo sapiens
cttaaactctkgttcattcct

SEQ ID NO: 14255 - DNA, 21 bp, Homo sapiens
atttaggagaytagctatttc

SEQ ID NO: 14256 - DNA, 21 bp, Homo sapiens
atatgtcaatmatcactagaa

SEQ ID NO: 14257 - DNA, 21 bp, Homo sapiens
ggcttttgctrtacccatcac

SEQ ID NO: 14258 - DNA, 21 bp, Homo sapiens
catcattttcygtttagagac

SEQ ID NO: 14259 - DNA, 21 bp, Homo sapiens
ttacaggttcrctctttctag

SEQ ID NO: 14260 - DNA, 21 bp, Homo sapiens
ggctattcttygctacttcct

SEQ ID NO: 14261 - DNA, 21 bp, Homo sapiens
atgataaagarattgtgatac

SEQ ID NO: 14262 - DNA, 21 bp, Homo sapiens
ccaagtttgakaaaagaagca

SEQ ID NO: 14263 - DNA, 21 bp, Homo sapiens
ggagatttgtrggccaaccaa

SEQ ID NO: 14264 - DNA, 21 bp, Homo sapiens
gactggctggrtggcctcctt

SEQ ID NO: 14265 - DNA, 21 bp, Homo sapiens
ttttaggaagytttggcaggc

SEQ ID NO: 14266 - DNA, 21 bp, Homo sapiens
ctaacccatcrcagcctccag

SEQ ID NO: 14267 - DNA, 21 bp, Homo sapiens
attgttccaayctagcagata

SEQ ID NO: 14268 - DNA, 21 bp, Homo sapiens
cctagataaayttcagttatt

SEQ ID NO: 14269 - DNA, 21 bp, Homo sapiens
agctgctaacygctgtataaa

SEQ ID NO: 14270 - DNA, 21 bp, Homo sapiens
tactcagagcraaggtcagga

SEQ ID NO: 14271 - DNA, 21 bp, Homo sapiens
agctcactcartaaatagcta

SEQ ID NO: 14272 - DNA, 21 bp, Homo sapiens
gtccatggaaraacacagctt

SEQ ID NO: 14273 - DNA, 21 bp, Homo sapiens
tttgtctacaytgagacattt

SEQ ID NO: 14274 - DNA, 21 bp, Homo sapiens
gcaatgccctktgtctcccac

SEQ ID NO: 14275 - DNA, 21 bp, Homo sapiens
aggaggatttyttatgctgct

SEQ ID NO: 14276 - DNA, 21 bp, Homo sapiens
aatgaaaagaracttttggaa

SEQ ID NO: 14277 - DNA, 21 bp, Homo sapiens
ttttacggctrtgtgtgaagt

SEQ ID NO: 14278 - DNA, 21 bp, Homo sapiens
ggggaaaaaartcttggttat

SEQ ID NO: 14279 - DNA, 21 bp, Homo sapiens
ataagattatrtgatttcttt

SEQ ID NO: 14280 - DNA, 21 bp, Homo sapiens
aaatcagtgtrcttgggggga

SEQ ID NO: 14281 - DNA, 21 bp, Homo sapiens
aagaaaaagcmaacagaactg

SEQ ID NO: 14282 - DNA, 21 bp, Homo sapiens
gaatatggatrtacattgtgc

SEQ ID NO: 14283 - DNA, 21 bp, Homo sapiens
tcagtgtgccraacatcatag

SEQ ID NO: 14284 - DNA, 21 bp, Homo sapiens
acattttgtcrtctatcaata

SEQ ID NO: 14285 - DNA, 21 bp, Homo sapiens
cagggagagakaatgagaggg

SEQ ID NO: 14286 - DNA, 21 bp, Homo sapiens
ttacttggagrctatttgatt

SEQ ID NO: 14287 - DNA, 21 bp, Homo sapiens
ctatcttgcaytgagtaagag

SEQ ID NO: 14288 - DNA, 21 bp, Homo sapiens
gaattaatagrtattactcga

SEQ ID NO: 14289 - DNA, 21 bp, Homo sapiens
actcagaaacrtaagttatct

SEQ ID NO: 14290 - DNA, 21 bp, Homo sapiens
tttcaaaggtkttaaacactg

SEQ ID NO: 14291 - DNA, 21 bp, Homo sapiens
ctttatatccyctgactggga

SEQ ID NO: 14292 - DNA, 21 bp, Homo sapiens
ccgaacaaacraaagtcaaga

SEQ ID NO: 14293 - DNA, 21 bp, Homo sapiens
tatttagcatrtagtgaatgc

SEQ ID NO: 14294 - DNA, 21 bp, Homo sapiens
cttgtactccrcatttttctt

SEQ ID NO: 14295 - DNA, 21 bp, Homo sapiens
aagaagccacyctttagtata

SEQ ID NO: 14296 - DNA, 21 bp, Homo sapiens
aaaataaatgrataaattagg

SEQ ID NO: 14297 - DNA, 21 bp, Homo sapiens
gaaaagtgaaygtacgcacat

SEQ ID NO: 14298 - DNA, 21 bp, Homo sapiens
tgccatgtggrcgactcagaa

SEQ ID NO: 14299 - DNA, 21 bp, Homo sapiens
caccaatttgygcaagtcatt

SEQ ID NO: 14300 - DNA, 21 bp, Homo sapiens
ccataaagtcrgtcagggcaa

SEQ ID NO: 14301 - DNA, 21 bp, Homo sapiens
gagtgccaagyaccctgcctc

SEQ ID NO: 14302 - DNA, 21 bp, Homo sapiens
ttctcagcagracacctgaca

SEQ ID NO: 14303 - DNA, 21 bp, Homo sapiens
agaatacagamattaatacag

SEQ ID NO: 14304 - DNA, 21 bp, Homo sapiens
acttggtcaaytcagattgat

SEQ ID NO: 14305 - DNA, 21 bp, Homo sapiens
taaagttgaayatggaaagta

SEQ ID NO: 14306 - DNA, 21 bp, Homo sapiens
tgaatacagargaggaggtcc

SEQ ID NO: 14307 - DNA, 21 bp, Homo sapiens
agcagggccayggtagctgct

SEQ ID NO: 14308 - DNA, 21 bp, Homo sapiens
cctgagccccrcacagaagcg

SEQ ID NO: 14309 - DNA, 21 bp, Homo sapiens
cctacctaacyccctctgtga

SEQ ID NO: 14310 - DNA, 21 bp, Homo sapiens
gagactaggtrgagatccgca

SEQ ID NO: 14311 - DNA, 21 bp, Homo sapiens
ctaggacataygagccctacc

SEQ ID NO: 14312 - DNA, 21 bp, Homo sapiens
gatctagacartgcctctgcc

SEQ ID NO: 14313 - DNA, 21 bp, Homo sapiens
tagccaacagyctgaaccttt

SEQ ID NO: 14314 - DNA, 21 bp, Homo sapiens
taccagcagcrgtcgtagatc

SEQ ID NO: 14315 - DNA, 21 bp, Homo sapiens
acacatttctyttttgtggct

SEQ ID NO: 14316 - DNA, 21 bp, Homo sapiens
aaaagtgattktgctcttgtt

SEQ ID NO: 14317 - DNA, 21 bp, Homo sapiens
gaacagccctmttctgctcgg

SEQ ID NO: 14318 - DNA, 21 bp, Homo sapiens
aaattgatttrcaaaccattg

SEQ ID NO: 14319 - DNA, 21 bp, Homo sapiens
actgagaagcrctagatatag

SEQ ID NO: 14320 - DNA, 21 bp, Homo sapiens
tggttccttargatggtttgt

SEQ ID NO: 14321 - DNA, 21 bp, Homo sapiens
aacctgccctrgaagaccagg

SEQ ID NO: 14322 - DNA, 21 bp, Homo sapiens
tttaaaataaygattgaatgt

SEQ ID NO: 14323 - DNA, 21 bp, Homo sapiens
cttagcttttygactctttta

SEQ ID NO: 14324 - DNA, 21 bp, Homo sapiens
ttaaaaagtgraagtacagat

SEQ ID NO: 14325 - DNA, 21 bp, Homo sapiens
ttgtccctcaygcaacatcca

SEQ ID NO: 14326 - DNA, 21 bp, Homo sapiens
ataactgggcycattgtgtat

SEQ ID NO: 14327 - DNA, 21 bp, Homo sapiens
tcacagcatcraagtgggtgt

SEQ ID NO: 14328 - DNA, 21 bp, Homo sapiens
atgagtgtatyccagccaggg

SEQ ID NO: 14329 - DNA, 21 bp, Homo sapiens
cacacattcamggcatgctgt

SEQ ID NO: 14330 - DNA, 21 bp, Homo sapiens
aatggcacacrggctaggcat

SEQ ID NO: 14331 - DNA, 21 bp, Homo sapiens
gaattctttckggccatctaa

SEQ ID NO: 14332 - DNA, 21 bp, Homo sapiens
agtagacaacrgtaatgtgaa

SEQ ID NO: 14333 - DNA, 21 bp, Homo sapiens
aaggatggacrtgtcgatcaa

SEQ ID NO: 14334 - DNA, 21 bp, Homo sapiens
caccataatgyctgagttcag

SEQ ID NO: 14335 - DNA, 21 bp, Homo sapiens
agcaagaaaargaggttgctt

SEQ ID NO: 14336 - DNA, 21 bp, Homo sapiens
ccctcacttaycctctttcca

SEQ ID NO: 14337 - DNA, 21 bp, Homo sapiens
agctcatagcrccaccagaga

SEQ ID NO: 14338 - DNA, 21 bp, Homo sapiens
agcaagcaagyaacaacagaa

SEQ ID NO: 14339 - DNA, 21 bp, Homo sapiens
cgctcaacgcrtggttgtttc

SEQ ID NO: 14340 - DNA, 21 bp, Homo sapiens
agactgaaatrgtcagggcct

SEQ ID NO: 14341 - DNA, 21 bp, Homo sapiens
acttgttcatygcctatcaag

SEQ ID NO: 14342 - DNA, 21 bp, Homo sapiens
ttctattgtamatacataaat

SEQ ID NO: 14343 - DNA, 21 bp, Homo sapiens
gaaaggcaacyggtcaacccc

SEQ ID NO: 14344 - DNA, 21 bp, Homo sapiens
ctgccccatcrgatgccttag

SEQ ID NO: 14345 - DNA, 21 bp, Homo sapiens
tggggagccayagatccagaa

SEQ ID NO: 14346 - DNA, 21 bp, Homo sapiens
ctctttccccmgggaggaaaa

SEQ ID NO: 14347 - DNA, 21 bp, Homo sapiens
cgcacgcttarggaagttagc

SEQ ID NO: 14348 - DNA, 21 bp, Homo sapiens
tgaggaacttrcctggaatga

SEQ ID NO: 14349 - DNA, 21 bp, Homo sapiens
ctgagcctttyctccacggta

SEQ ID NO: 14350 - DNA, 21 bp, Homo sapiens
tagagccatgracttgtaata

SEQ ID NO: 14351 - DNA, 21 bp, Homo sapiens
tgaggaagatrtggtactgca

SEQ ID NO: 14352 - DNA, 21 bp, Homo sapiens
atctagatttytgtcgattca

SEQ ID NO: 14353 - DNA, 21 bp, Homo sapiens
tataaatagartcatacagtg

SEQ ID NO: 14354 - DNA, 21 bp, Homo sapiens
ttcttttagcygtatcttttg

SEQ ID NO: 14355 - DNA, 21 bp, Homo sapiens
tcagttcattkatccagtgtt

SEQ ID NO: 14356 - DNA, 21 bp, Homo sapiens
gtgtttccatrtatttatcca

SEQ ID NO: 14357 - DNA, 21 bp, Homo sapiens
cctagaaaatmagaccttaac

SEQ ID NO: 14358 - DNA, 21 bp, Homo sapiens
gatgtgacacmtgcatacata

SEQ ID NO: 14359 - DNA, 21 bp, Homo sapiens
aatattttatycatgagatca

SEQ ID NO: 14360 - DNA, 21 bp, Homo sapiens
agctgggaagmattaatcaag

SEQ ID NO: 14361 - DNA, 21 bp, Homo sapiens
tgagtcagagmcttgccaggt

SEQ ID NO: 14362 - DNA, 21 bp, Homo sapiens
cccaggaaagrtagagggctc

SEQ ID NO: 14363 - DNA, 21 bp, Homo sapiens
gctagtgcgtrctcatgggat

SEQ ID NO: 14364 - DNA, 21 bp, Homo sapiens
gtatggcttaytgagattatt

SEQ ID NO: 14365 - DNA, 21 bp, Homo sapiens
ttgagaccaamgtctaaggga

SEQ ID NO: 14366 - DNA, 21 bp, Homo sapiens
tttgttcatgytctaacaact

SEQ ID NO: 14367 - DNA, 21 bp, Homo sapiens
aactttttcaycttagcacaa

SEQ ID NO: 14368 - DNA, 21 bp, Homo sapiens
ctgcctactcygtgtagtcca

SEQ ID NO: 14369 - DNA, 21 bp, Homo sapiens
actgagcttaygttctggttc

SEQ ID NO: 14370 - DNA, 21 bp, Homo sapiens
tgtctgagtcycttgaaagtt

SEQ ID NO: 14371 - DNA, 21 bp, Homo sapiens
catgcatgctrtacattatac

SEQ ID NO: 14372 - DNA, 21 bp, Homo sapiens
aaaatcatctrtgttgcgttc

SEQ ID NO: 14373 - DNA, 21 bp, Homo sapiens
agggtggtatragagtcccat

SEQ ID NO: 14374 - DNA, 21 bp, Homo sapiens
agagagaaaayagaatgagag

SEQ ID NO: 14375 - DNA, 21 bp, Homo sapiens
attccaggagycaggattctg

SEQ ID NO: 14376 - DNA, 21 bp, Homo sapiens
ctttacatgarcaactaccct

SEQ ID NO: 14377 - DNA, 21 bp, Homo sapiens
gataccagtaygagtgacttt

SEQ ID NO: 14378 - DNA, 21 bp, Homo sapiens
ccagtcatacrtgggaatcac

SEQ ID NO: 14379 - DNA, 21 bp, Homo sapiens
atgatgtgaaygtagtatctc

SEQ ID NO: 14380 - DNA, 21 bp, Homo sapiens
attggtgagtkttatttacgt

SEQ ID NO: 14381 - DNA, 21 bp, Homo sapiens
ataacaccagrtatgtagagg

SEQ ID NO: 14382 - DNA, 21 bp, Homo sapiens
tttctctttakttgagaagaa

SEQ ID NO: 14383 - DNA, 21 bp, Homo sapiens
tggatagaatyattagagttg

SEQ ID NO: 14384 - DNA, 21 bp, Homo sapiens
actatcaaaarcttcataatt

SEQ ID NO: 14385 - DNA, 21 bp, Homo sapiens
ggctgattttytaatgctgta

SEQ ID NO: 14386 - DNA, 21 bp, Homo sapiens
aaccttctttrgcaattgtct

SEQ ID NO: 14387 - DNA, 21 bp, Homo sapiens
aaaagtaattrcacccagtaa

SEQ ID NO: 14388 - DNA, 21 bp, Homo sapiens
ctacagagttrtggtaatcaa

SEQ ID NO: 14389 - DNA, 21 bp, Homo sapiens
aaaatgttgckgccctttagg

SEQ ID NO: 14390 - DNA, 21 bp, Homo sapiens
tgattgtctcrctggtgcttg

SEQ ID NO: 14391 - DNA, 21 bp, Homo sapiens
tgaatacctcrgagcatgagt

SEQ ID NO: 14392 - DNA, 21 bp, Homo sapiens
gtcatttaggrtaggctctaa

SEQ ID NO: 14393 - DNA, 21 bp, Homo sapiens
taaatttattyaacttaaagc

SEQ ID NO: 14394 - DNA, 21 bp, Homo sapiens
taagggatgcrttatgtttat

SEQ ID NO: 14395 - DNA, 21 bp, Homo sapiens
ttctaagatamtaaattgttg

SEQ ID NO: 14396 - DNA, 21 bp, Homo sapiens
ttagttgaatygtgatcattc

SEQ ID NO: 14397 - DNA, 21 bp, Homo sapiens
actcctgcctrtaggcagggg

SEQ ID NO: 14398 - DNA, 21 bp, Homo sapiens
ggagcagtacyttgcacatag

SEQ ID NO: 14399 - DNA, 21 bp, Homo sapiens
accttgtataytgtttctccc

SEQ ID NO: 14400 - DNA, 21 bp, Homo sapiens
acccaggtaarcctgcagcta

SEQ ID NO: 14401 - DNA, 21 bp, Homo sapiens
aggaccatcargaaggacaac

SEQ ID NO: 14402 - DNA, 21 bp, Homo sapiens
aaaatctttayctccacttaa

SEQ ID NO: 14403 - DNA, 21 bp, Homo sapiens
attctgtttayggagaacaga

SEQ ID NO: 14404 - DNA, 21 bp, Homo sapiens
cacttttagtytgaaattctc

SEQ ID NO: 14405 - DNA, 21 bp, Homo sapiens
gatggataaartcagagagtt

SEQ ID NO: 14406 - DNA, 21 bp, Homo sapiens
aaaagctgggrtttcagagta

SEQ ID NO: 14407 - DNA, 21 bp, Homo sapiens
gagctgaaacmaccctaaaga

SEQ ID NO: 14408 - DNA, 21 bp, Homo sapiens
cccaaaacctrtctctggccc

SEQ ID NO: 14409 - DNA, 21 bp, Homo sapiens
actttggcaartttttaaata

SEQ ID NO: 14410 - DNA, 21 bp, Homo sapiens
ggagaaacatrtatttactga

SEQ ID NO: 14411 - DNA, 21 bp, Homo sapiens
cacagagggayagtgagagcg

SEQ ID NO: 14412 - DNA, 21 bp, Homo sapiens
tttaatttggrtcagtctggt

SEQ ID NO: 14413 - DNA, 21 bp, Homo sapiens
ggctttgactrctcactaccc

SEQ ID NO: 14414 - DNA, 21 bp, Homo sapiens
ctcacccgggyccagatttcc

SEQ ID NO: 14415 - DNA, 21 bp, Homo sapiens
cacataattartcatgcacta

SEQ ID NO: 14416 - DNA, 21 bp, Homo sapiens
atgtccaagtrgaactgtcct

SEQ ID NO: 14417 - DNA, 21 bp, Homo sapiens
ctgacgcaatktaagtacagc

SEQ ID NO: 14418 - DNA, 21 bp, Homo sapiens
gggattgttcragatcttttg

SEQ ID NO: 14419 - DNA, 21 bp, Homo sapiens
agagttcccckaagccccctg

SEQ ID NO: 14420 - DNA, 21 bp, Homo sapiens
gtttatatgtrtatatatata

SEQ ID NO: 14421 - DNA, 21 bp, Homo sapiens
ttttctgcctrtgagcttctt

SEQ ID NO: 14422 - DNA, 21 bp, Homo sapiens
ggaattagggyttcaaatctc

SEQ ID NO: 14423 - DNA, 21 bp, Homo sapiens
gctaaaacttyttttagatca

SEQ ID NO: 14424 - DNA, 21 bp, Homo sapiens
agatagaaaartaggtgttca

SEQ ID NO: 14425 - DNA, 21 bp, Homo sapiens
tgtttcccacmtatgctgtta

SEQ ID NO: 14426 - DNA, 21 bp, Homo sapiens
taacaggaatkaaaaaacaaa

SEQ ID NO: 14427 - DNA, 21 bp, Homo sapiens
aactctcatgyggtcaggggg

SEQ ID NO: 14428 - DNA, 21 bp, Homo sapiens
ctctggccatygtaatccatg

SEQ ID NO: 14429 - DNA, 21 bp, Homo sapiens
gcgcataagtkgcaccatttc

SEQ ID NO: 14430 - DNA, 21 bp, Homo sapiens
aggagaaaggyattctggacc

SEQ ID NO: 14431 - DNA, 21 bp, Homo sapiens
tccaggcaagrttcctttaaa

SEQ ID NO: 14432 - DNA, 21 bp, Homo sapiens
gcatttttacrtattttttag

SEQ ID NO: 14433 - DNA, 21 bp, Homo sapiens
aacatttaatyctgaagacag

SEQ ID NO: 14434 - DNA, 21 bp, Homo sapiens
gagtgagtctratcgccacat

SEQ ID NO: 14435 - DNA, 21 bp, Homo sapiens
atatcttgccytgccagaatg

SEQ ID NO: 14436 - DNA, 21 bp, Homo sapiens
tcctgatgaayctcctggggc

SEQ ID NO: 14437 - DNA, 21 bp, Homo sapiens
cctagcagtgygaagctctat

SEQ ID NO: 14438 - DNA, 21 bp, Homo sapiens
aagacatcctragcgaggtag

SEQ ID NO: 14439 - DNA, 21 bp, Homo sapiens
tctctggaatraggaaatagc

SEQ ID NO: 14440 - DNA, 21 bp, Homo sapiens
tcttaaactgyagtctggcta

SEQ ID NO: 14441 - DNA, 21 bp, Homo sapiens
aatagcagttrtaaggagcaa

SEQ ID NO: 14442 - DNA, 21 bp, Homo sapiens
gacccaaagartgaccagttg

SEQ ID NO: 14443 - DNA, 21 bp, Homo sapiens
gattctccttytagctattat

SEQ ID NO: 14444 - DNA, 21 bp, Homo sapiens
caagaaagttkgaaatggtac

SEQ ID NO: 14445 - DNA, 21 bp, Homo sapiens
cttatcccacrtttcccactt

SEQ ID NO: 14446 - DNA, 21 bp, Homo sapiens
tagatgagttrggtagaacaa

SEQ ID NO: 14447 - DNA, 21 bp, Homo sapiens
gcaccagtgtrtcagtttaca

SEQ ID NO: 14448 - DNA, 21 bp, Homo sapiens
ggattccaggragtaagcctc

SEQ ID NO: 14449 - DNA, 21 bp, Homo sapiens
atgagaaatcyagggccccgt

SEQ ID NO: 14450 - DNA, 21 bp, Homo sapiens
taaaatgcctyataatcatct

SEQ ID NO: 14451 - DNA, 21 bp, Homo sapiens
ctttcgctgayttcaggaaaa

SEQ ID NO: 14452 - DNA, 21 bp, Homo sapiens
aaaagtctaartagactgtta

SEQ ID NO: 14453 - DNA, 21 bp, Homo sapiens
ctaccaaccgrctgaccccac

SEQ ID NO: 14454 - DNA, 21 bp, Homo sapiens
ctactgatgcygaacaaccta

SEQ ID NO: 14455 - DNA, 21 bp, Homo sapiens
ggtgaggaccrccggtgtcag

SEQ ID NO: 14456 - DNA, 21 bp, Homo sapiens
atctctcctcrgagcagttct

SEQ ID NO: 14457 - DNA, 21 bp, Homo sapiens
aggcagtgctkatcttggaag

SEQ ID NO: 14458 - DNA, 21 bp, Homo sapiens
tgtagcttcartgtttaaggt

SEQ ID NO: 14459 - DNA, 21 bp, Homo sapiens
gaaattgcccmagaagactct

SEQ ID NO: 14460 - DNA, 21 bp, Homo sapiens
ccctagtttgyctatctgcaa

SEQ ID NO: 14461 - DNA, 21 bp, Homo sapiens
ttaatattctrtggggcaata

SEQ ID NO: 14462 - DNA, 21 bp, Homo sapiens
tgcaaggcccrttgtaccaca

SEQ ID NO: 14463 - DNA, 21 bp, Homo sapiens
tgggtcccacrtgcaaattca

SEQ ID NO: 14464 - DNA, 21 bp, Homo sapiens
atgattgtgtraaagagtgaa

SEQ ID NO: 14465 - DNA, 21 bp, Homo sapiens
cctgggctggyatgttagata

SEQ ID NO: 14466 - DNA, 21 bp, Homo sapiens
tttccacagaraaccagggct

SEQ ID NO: 14467 - DNA, 21 bp, Homo sapiens
cagggagaccrtgtggttata

SEQ ID NO: 14468 - DNA, 21 bp, Homo sapiens
aggattgaagyggggaaggct

SEQ ID NO: 14469 - DNA, 21 bp, Homo sapiens
gtaagacatcyagaaggactg

SEQ ID NO: 14470 - DNA, 21 bp, Homo sapiens
gttttgaatcyttcccatgct

SEQ ID NO: 14471 - DNA, 21 bp, Homo sapiens
ttcagcgtaamgaattagtct

SEQ ID NO: 14472 - DNA, 21 bp, Homo sapiens
agattattacyaactggatag

SEQ ID NO: 14473 - DNA, 21 bp, Homo sapiens
accaattcatyttacggcaga

SEQ ID NO: 14474 - DNA, 21 bp, Homo sapiens
gcttactcaakaagaaacaga

SEQ ID NO: 14475 - DNA, 21 bp, Homo sapiens
ttgaactctaycacctataca

SEQ ID NO: 14476 - DNA, 21 bp, Homo sapiens
acagcacctamagccccaaat

SEQ ID NO: 14477 - DNA, 21 bp, Homo sapiens
gtgaggatggyggtgtggaga

SEQ ID NO: 14478 - DNA, 21 bp, Homo sapiens
ctttctgggckgggagactcg

SEQ ID NO: 14479 - DNA, 21 bp, Homo sapiens
gacagagacaractgtcccgg

SEQ ID NO: 14480 - DNA, 21 bp, Homo sapiens
gaccctggcamgatctgggtg

SEQ ID NO: 14481 - DNA, 21 bp, Homo sapiens
atgggatctcycctcccttcc

SEQ ID NO: 14482 - DNA, 21 bp, Homo sapiens
tctcttgggcytggcaggcat

SEQ ID NO: 14483 - DNA, 21 bp, Homo sapiens
ctcccccagcratgttcttgt

SEQ ID NO: 14484 - DNA, 21 bp, Homo sapiens
tatggaaatcygtgaggagtc

SEQ ID NO: 14485 - DNA, 21 bp, Homo sapiens
cagagccccarggacacttgt

SEQ ID NO: 14486 - DNA, 21 bp, Homo sapiens
tagtgactcamggcattttta

SEQ ID NO: 14487 - DNA, 21 bp, Homo sapiens
ggttgcctaaygatagatgct

SEQ ID NO: 14488 - DNA, 21 bp, Homo sapiens
tatctcgcgakacttgctatt

SEQ ID NO: 14489 - DNA, 21 bp, Homo sapiens
ctgaggatgcrtgttggcaga

SEQ ID NO: 14490 - DNA, 21 bp, Homo sapiens
gatttcttgayttcgtgagct

SEQ ID NO: 14491 - DNA, 21 bp, Homo sapiens
agttctgcctraagagatcag

SEQ ID NO: 14492 - DNA, 21 bp, Homo sapiens
ttcaattgtgktaattctttc

SEQ ID NO: 14493 - DNA, 21 bp, Homo sapiens
tttaaattaaytttagatcca

SEQ ID NO: 14494 - DNA, 21 bp, Homo sapiens
tcatgtcttayactttctcac

SEQ ID NO: 14495 - DNA, 21 bp, Homo sapiens
tttcaactctkctgtaacttc

SEQ ID NO: 14496 - DNA, 21 bp, Homo sapiens
aaatgtggagmtctaattcaa

SEQ ID NO: 14497 - DNA, 21 bp, Homo sapiens
agatgatgagrgtggggtaat

SEQ ID NO: 14498 - DNA, 21 bp, Homo sapiens
tcagaagacaracaagatgcg

SEQ ID NO: 14499 - DNA, 21 bp, Homo sapiens
aagggctcttygctgtcccgg

SEQ ID NO: 14500 - DNA, 21 bp, Homo sapiens
ttgatggttgyagagatgggg

SEQ ID NO: 14501 - DNA, 21 bp, Homo sapiens
tctcacaaatytccttcatag

SEQ ID NO: 14502 - DNA, 21 bp, Homo sapiens
cttttctgcakgctgtaattt

SEQ ID NO: 14503 - DNA, 21 bp, Homo sapiens
gggagccattratggcttttg

SEQ ID NO: 14504 - DNA, 21 bp, Homo sapiens
tatctagcaarggcctctttg

SEQ ID NO: 14505 - DNA, 21 bp, Homo sapiens
tgaaccacatrattatttgtt

SEQ ID NO: 14506 - DNA, 21 bp, Homo sapiens
ttatcacttayactttactct

SEQ ID NO: 14507 - DNA, 21 bp, Homo sapiens
ctgtcatgctycaatgcaaca

SEQ ID NO: 14508 - DNA, 21 bp, Homo sapiens
aaagccatgtrcactgcacaa

SEQ ID NO: 14509 - DNA, 21 bp, Homo sapiens
aactctattgmctatcattct

SEQ ID NO: 14510 - DNA, 21 bp, Homo sapiens
tttatgttggmaaggaatagt

SEQ ID NO: 14511 - DNA, 21 bp, Homo sapiens
tgtgagcagcytgatcatctc

SEQ ID NO: 14512 - DNA, 21 bp, Homo sapiens
caaaaaagagrtttaagttca

SEQ ID NO: 14513 - DNA, 21 bp, Homo sapiens
tcctgaactgytgtcaattgg

SEQ ID NO: 14514 - DNA, 21 bp, Homo sapiens
atggagaagcrgtatttatct

SEQ ID NO: 14515 - DNA, 21 bp, Homo sapiens
taggatctacrtgggtaagga

SEQ ID NO: 14516 - DNA, 21 bp, Homo sapiens
attaagaagcmtcgtgtgact

SEQ ID NO: 14517 - DNA, 21 bp, Homo sapiens
gtggctatcaragaatgacaa

SEQ ID NO: 14518 - DNA, 21 bp, Homo sapiens
taaagctaccrgacaggaatt

SEQ ID NO: 14519 - DNA, 21 bp, Homo sapiens
ccttgttcgtycagaattaat

SEQ ID NO: 14520 - DNA, 21 bp, Homo sapiens
ttcaggtaatkaggtttaggt

SEQ ID NO: 14521 - DNA, 21 bp, Homo sapiens
tccatgacccrtaacaggtca

SEQ ID NO: 14522 - DNA, 21 bp, Homo sapiens
atttgtctatktcttgtctaa

SEQ ID NO: 14523 - DNA, 21 bp, Homo sapiens
ttctcatccaragactaaaat

SEQ ID NO: 14524 - DNA, 21 bp, Homo sapiens
ttacagtgtayctgtagaact

SEQ ID NO: 14525 - DNA, 21 bp, Homo sapiens
aatgacttccrtgttgctttg

SEQ ID NO: 14526 - DNA, 21 bp, Homo sapiens
cctactgggamcctgactcag

SEQ ID NO: 14527 - DNA, 21 bp, Homo sapiens
ttttcatacaragagaatagg

SEQ ID NO: 14528 - DNA, 21 bp, Homo sapiens
ctttatgatayaaagcacatt

SEQ ID NO: 14529 - DNA, 21 bp, Homo sapiens
gagaagaggaytgacacactc

SEQ ID NO: 14530 - DNA, 21 bp, Homo sapiens
ttatcttcatrcttccatttt

SEQ ID NO: 14531 - DNA, 21 bp, Homo sapiens
tttctatacartacacttttt

SEQ ID NO: 14532 - DNA, 21 bp, Homo sapiens
aatgacatctmcctcgtgttt

SEQ ID NO: 14533 - DNA, 21 bp, Homo sapiens
atctattcagyaaaagattat

SEQ ID NO: 14534 - DNA, 21 bp, Homo sapiens
gaagttcagarttgaataatt

SEQ ID NO: 14535 - DNA, 21 bp, Homo sapiens
gtcccagtatmgcaactacaa

SEQ ID NO: 14536 - DNA, 21 bp, Homo sapiens
gaataaagtcrttgctattgt

SEQ ID NO: 14537 - DNA, 21 bp, Homo sapiens
gtatcttgaakatcatataca

SEQ ID NO: 14538 - DNA, 21 bp, Homo sapiens
ctactgggagmtctgtctcag

SEQ ID NO: 14539 - DNA, 21 bp, Homo sapiens
ataatttcaayttaaaaaatt

SEQ ID NO: 14540 - DNA, 21 bp, Homo sapiens
ctcagtttatrtccagggtta

SEQ ID NO: 14541 - DNA, 21 bp, Homo sapiens
cttagacgtgrtttcctgttt

SEQ ID NO: 14542 - DNA, 21 bp, Homo sapiens
ctttgtgtctrttttcataaa

SEQ ID NO: 14543 - DNA, 21 bp, Homo sapiens
tcaaacttccrcaccaagttt

SEQ ID NO: 14544 - DNA, 21 bp, Homo sapiens
tatcccagggmagatggagag

SEQ ID NO: 14545 - DNA, 21 bp, Homo sapiens
actccccacayctgacgaatg

SEQ ID NO: 14546 - DNA, 21 bp, Homo sapiens
gatggcttttyagagaactac

SEQ ID NO: 14547 - DNA, 21 bp, Homo sapiens
aatgctttgcytcaaacagct

SEQ ID NO: 14548 - DNA, 21 bp, Homo sapiens
ggcaagctggrttaaagaata

SEQ ID NO: 14549 - DNA, 21 bp, Homo sapiens
agctgttaaakttaagtcacc

SEQ ID NO: 14550 - DNA, 21 bp, Homo sapiens
ctcatgaatgktgttgcttta

SEQ ID NO: 14551 - DNA, 21 bp, Homo sapiens
accttccagtmatggtgaaaa

SEQ ID NO: 14552 - DNA, 21 bp, Homo sapiens
ttgcaacgtayacccaaaatc

SEQ ID NO: 14553 - DNA, 21 bp, Homo sapiens
gcccaaggtcrtatatcttct

SEQ ID NO: 14554 - DNA, 21 bp, Homo sapiens
agggtcacagrtaagtcaggg

SEQ ID NO: 14555 - DNA, 21 bp, Homo sapiens
aatgtgctatrtttgaacaac

SEQ ID NO: 14556 - DNA, 21 bp, Homo sapiens
ataaaactcckacctgggaac

SEQ ID NO: 14557 - DNA, 21 bp, Homo sapiens
ttgttgacagratagcatgtc

SEQ ID NO: 14558 - DNA, 21 bp, Homo sapiens
gagtttctttyttaaaactta

SEQ ID NO: 14559 - DNA, 21 bp, Homo sapiens
aaaacatacckccctctttcc

SEQ ID NO: 14560 - DNA, 21 bp, Homo sapiens
tcttttttgaygcctcttctc

SEQ ID NO: 14561 - DNA, 21 bp, Homo sapiens
atttatcaaakgatagttgaa

SEQ ID NO: 14562 - DNA, 21 bp, Homo sapiens
tccgccctccrgagaggtcgg

SEQ ID NO: 14563 - DNA, 21 bp, Homo sapiens
catcaaaatayctcctttcaa

SEQ ID NO: 14564 - DNA, 21 bp, Homo sapiens
aattatggatratgtaatttt

SEQ ID NO: 14565 - DNA, 21 bp, Homo sapiens
agactctcccrtgttacaacc

SEQ ID NO: 14566 - DNA, 21 bp, Homo sapiens
taagtgttccrgcaacagcta

SEQ ID NO: 14567 - DNA, 21 bp, Homo sapiens
caatgacttcycatgataaac

SEQ ID NO: 14568 - DNA, 21 bp, Homo sapiens
atctgttgctrtaagtaggct

SEQ ID NO: 14569 - DNA, 21 bp, Homo sapiens
aataaaacaayacgaagctga

SEQ ID NO: 14570 - DNA, 21 bp, Homo sapiens
gccatgtaagkgataaagtca

SEQ ID NO: 14571 - DNA, 21 bp, Homo sapiens
tgattcttcakggccagatgt

SEQ ID NO: 14572 - DNA, 21 bp, Homo sapiens
aaaatggtacyaaaaacagct

SEQ ID NO: 14573 - DNA, 21 bp, Homo sapiens
ttaccatatgkaaatacgaaa

SEQ ID NO: 14574 - DNA, 21 bp, Homo sapiens
aagtacaaaayaagacatttt

SEQ ID NO: 14575 - DNA, 21 bp, Homo sapiens
ctacagaaagyggcttcaaag

SEQ ID NO: 14576 - DNA, 21 bp, Homo sapiens
atgatttcacygtgggaaaaa

SEQ ID NO: 14577 - DNA, 21 bp, Homo sapiens
ccttcaagtgyacagtctctt

SEQ ID NO: 14578 - DNA, 21 bp, Homo sapiens
ctcaactgcaraaggtggatg

SEQ ID NO: 14579 - DNA, 21 bp, Homo sapiens
tcttcttgctrtgtctcagcc

SEQ ID NO: 14580 - DNA, 21 bp, Homo sapiens
tttacatgaaygtcacctagt

SEQ ID NO: 14581 - DNA, 21 bp, Homo sapiens
acattatacartgaggactct

SEQ ID NO: 14582 - DNA, 21 bp, Homo sapiens
atccaccttaygggaaagatg

SEQ ID NO: 14583 - DNA, 21 bp, Homo sapiens
caaatagttcrtaaaggatta

SEQ ID NO: 14584 - DNA, 21 bp, Homo sapiens
ccatggagagycattttagag

SEQ ID NO: 14585 - DNA, 21 bp, Homo sapiens
agtgtgaactrtgggaaaatt

SEQ ID NO: 14586 - DNA, 21 bp, Homo sapiens
tgctagagagktctacatgca

SEQ ID NO: 14587 - DNA, 21 bp, Homo sapiens
taaaagatttratgaagtaat

SEQ ID NO: 14588 - DNA, 21 bp, Homo sapiens
ctgttacttgkgtagtagaaa

SEQ ID NO: 14589 - DNA, 21 bp, Homo sapiens
taggtaggttragtacttaat

SEQ ID NO: 14590 - DNA, 21 bp, Homo sapiens
agtttaatatrtcctcactta

SEQ ID NO: 14591 - DNA, 21 bp, Homo sapiens
ccatcaagtgrtttagctccc

SEQ ID NO: 14592 - DNA, 21 bp, Homo sapiens
ctgtccaccaytgcagatgca

SEQ ID NO: 14593 - DNA, 21 bp, Homo sapiens
caaacgtgatmagtgttgaaa

SEQ ID NO: 14594 - DNA, 21 bp, Homo sapiens
ataaatgtatrtaagcaaatg

SEQ ID NO: 14595 - DNA, 21 bp, Homo sapiens
actaccatttygttcacactt

SEQ ID NO: 14596 - DNA, 21 bp, Homo sapiens
gggataacttrgatgaattgc

SEQ ID NO: 14597 - DNA, 21 bp, Homo sapiens
ggatagtggtyaaaggcagca

SEQ ID NO: 14598 - DNA, 21 bp, Homo sapiens
tattatctgamtgcttgaact

SEQ ID NO: 14599 - DNA, 21 bp, Homo sapiens
ataaaatcatytggttcaact

SEQ ID NO: 14600 - DNA, 21 bp, Homo sapiens
cttaatcacarttagtaatta

SEQ ID NO: 14601 - DNA, 21 bp, Homo sapiens
cttctagttcrcctcattttt

SEQ ID NO: 14602 - DNA, 21 bp, Homo sapiens
tacccttttcrggactggctg

SEQ ID NO: 14603 - DNA, 21 bp, Homo sapiens
acatgctgttyaggttcagaa

SEQ ID NO: 14604 - DNA, 21 bp, Homo sapiens
caagaatatcytcaggcatcc

SEQ ID NO: 14605 - DNA, 21 bp, Homo sapiens
agttggactayggactccttg

SEQ ID NO: 14606 - DNA, 21 bp, Homo sapiens
tattcccaggrgaaagctgat

SEQ ID NO: 14607 - DNA, 21 bp, Homo sapiens
ataatcagaayagtattcaca

SEQ ID NO: 14608 - DNA, 21 bp, Homo sapiens
taaagaataayaacaatagtt

SEQ ID NO: 14609 - DNA, 21 bp, Homo sapiens
aaagggagcaraatagctaac

SEQ ID NO: 14610 - DNA, 21 bp, Homo sapiens
ttgactccagrtaagagtgtt

SEQ ID NO: 14611 - DNA, 21 bp, Homo sapiens
aagttcacatyggttttcttc

SEQ ID NO: 14612 - DNA, 21 bp, Homo sapiens
tgtttgtaaayatcaattagg

SEQ ID NO: 14613 - DNA, 21 bp, Homo sapiens
tcaatcctctyagccatttat

SEQ ID NO: 14614 - DNA, 21 bp, Homo sapiens
actttcctacrtagtgggaag

SEQ ID NO: 14615 - DNA, 21 bp, Homo sapiens
tccccagtttyatgaggttta

SEQ ID NO: 14616 - DNA, 21 bp, Homo sapiens
gctggattgtktgtagtctca

SEQ ID NO: 14617 - DNA, 21 bp, Homo sapiens
catgcacacamatttccatca

SEQ ID NO: 14618 - DNA, 21 bp, Homo sapiens
agatgcaaagmctaattcaga

SEQ ID NO: 14619 - DNA, 21 bp, Homo sapiens
tagagagaagytgagttgtga

SEQ ID NO: 14620 - DNA, 21 bp, Homo sapiens
ctccaaagttrgcaatgtgga

SEQ ID NO: 14621 - DNA, 21 bp, Homo sapiens
taatccctcaygtcctgctta

SEQ ID NO: 14622 - DNA, 21 bp, Homo sapiens
ctaggccaagkctaaaggggc

SEQ ID NO: 14623 - DNA, 21 bp, Homo sapiens
acctgtatttytaaatatttt

SEQ ID NO: 14624 - DNA, 21 bp, Homo sapiens
tgatcttcatygcatatatac

SEQ ID NO: 14625 - DNA, 21 bp, Homo sapiens
tattctattcrttacccccgt

SEQ ID NO: 14626 - DNA, 21 bp, Homo sapiens
tacatatatakagagagagtg

SEQ ID NO: 14627 - DNA, 21 bp, Homo sapiens
gtcttttatcrcaggcaaaag

SEQ ID NO: 14628 - DNA, 21 bp, Homo sapiens
ttttctcctcrgtatagaaac

SEQ ID NO: 14629 - DNA, 21 bp, Homo sapiens
cagaatggacrtgttgggaaa

SEQ ID NO: 14630 - DNA, 21 bp, Homo sapiens
cccctttagtkgcaaaacggg

SEQ ID NO: 14631 - DNA, 21 bp, Homo sapiens
tagaagttacrtaatacataa

SEQ ID NO: 14632 - DNA, 21 bp, Homo sapiens
ttttcttttckaagtgtcagg

SEQ ID NO: 14633 - DNA, 21 bp, Homo sapiens
tctatacttcytccgtatctc

SEQ ID NO: 14634 - DNA, 21 bp, Homo sapiens
tacagaataargaatagattg

SEQ ID NO: 14635 - DNA, 21 bp, Homo sapiens
tcacgaaaatrtatgccaatg

SEQ ID NO: 14636 - DNA, 21 bp, Homo sapiens
ggggcaatgtrtacattcaac

SEQ ID NO: 14637 - DNA, 21 bp, Homo sapiens
gagtattttcrttttaactga

SEQ ID NO: 14638 - DNA, 21 bp, Homo sapiens
agccataagaytggaaagaga

SEQ ID NO: 14639 - DNA, 21 bp, Homo sapiens
aaaaaggctaygtactatctt

SEQ ID NO: 14640 - DNA, 21 bp, Homo sapiens
gctggttcggrgaaaaaccag

SEQ ID NO: 14641 - DNA, 21 bp, Homo sapiens
atgtcatagcytcatccaaga

SEQ ID NO: 14642 - DNA, 21 bp, Homo sapiens
agtaaaatccrtggtccaact

SEQ ID NO: 14643 - DNA, 21 bp, Homo sapiens
accttggctayacatgcttaa

SEQ ID NO: 14644 - DNA, 21 bp, Homo sapiens
cgacacttctkctgcatttga

SEQ ID NO: 14645 - DNA, 21 bp, Homo sapiens
agtcctgataygatgttgtag

SEQ ID NO: 14646 - DNA, 21 bp, Homo sapiens
tctgccattaratattctatt

SEQ ID NO: 14647 - DNA, 21 bp, Homo sapiens
gaactcctccraccgtccccg

SEQ ID NO: 14648 - DNA, 21 bp, Homo sapiens
ccttgtgttcrtcccaggtcc

SEQ ID NO: 14649 - DNA, 21 bp, Homo sapiens
tctaggatatrttattaaatg

SEQ ID NO: 14650 - DNA, 21 bp, Homo sapiens
tcttgcatcaygaaaggaaga

SEQ ID NO: 14651 - DNA, 21 bp, Homo sapiens
gatagaacaamacctgcaaat

SEQ ID NO: 14652 - DNA, 21 bp, Homo sapiens
gggcatttgaktgaaattcag

SEQ ID NO: 14653 - DNA, 21 bp, Homo sapiens
agcactgtagyataccatatc

SEQ ID NO: 14654 - DNA, 21 bp, Homo sapiens
gtaatgttgcyatggaaacca

SEQ ID NO: 14655 - DNA, 21 bp, Homo sapiens
atagttaaccrtaagtgggta

SEQ ID NO: 14656 - DNA, 21 bp, Homo sapiens
tgacttcctgygtgcctgtgc

SEQ ID NO: 14657 - DNA, 21 bp, Homo sapiens
caatctttaayctaggctaca

SEQ ID NO: 14658 - DNA, 21 bp, Homo sapiens
agaagggtctygggtccctaa

SEQ ID NO: 14659 - DNA, 21 bp, Homo sapiens
cccattaaaayaagcattgaa

SEQ ID NO: 14660 - DNA, 21 bp, Homo sapiens
gcaagaaggargaaatgtaca

SEQ ID NO: 14661 - DNA, 21 bp, Homo sapiens
acagacatgtraagaaatggt

SEQ ID NO: 14662 - DNA, 21 bp, Homo sapiens
ctacatttgargtccagcctt

SEQ ID NO: 14663 - DNA, 21 bp, Homo sapiens
ataccttcaayacctttctgc

SEQ ID NO: 14664 - DNA, 21 bp, Homo sapiens
catcactccargcatctacta

SEQ ID NO: 14665 - DNA, 21 bp, Homo sapiens
agatgactcartaaataatgt

SEQ ID NO: 14666 - DNA, 21 bp, Homo sapiens
taaatgtattrgtgtctctgg

SEQ ID NO: 14667 - DNA, 21 bp, Homo sapiens
acaacccagamacttctcata

SEQ ID NO: 14668 - DNA, 21 bp, Homo sapiens
ctaagctatgrccttaggatg

SEQ ID NO: 14669 - DNA, 21 bp, Homo sapiens
tcggcactgtratgtttagag

SEQ ID NO: 14670 - DNA, 21 bp, Homo sapiens
ctctccattgrtggcgaactg

SEQ ID NO: 14671 - DNA, 21 bp, Homo sapiens
acctttggtartgacaatctg

SEQ ID NO: 14672 - DNA, 21 bp, Homo sapiens
tggacactgartatctaggct

SEQ ID NO: 14673 - DNA, 21 bp, Homo sapiens
taggtgttcartaagtatttg

SEQ ID NO: 14674 - DNA, 21 bp, Homo sapiens
cattttaacaytcctcattat

SEQ ID NO: 14675 - DNA, 21 bp, Homo sapiens
gcctgcagtgkaatggaggaa

SEQ ID NO: 14676 - DNA, 21 bp, Homo sapiens
actgcagactkaaattaagac

SEQ ID NO: 14677 - DNA, 21 bp, Homo sapiens
ggaggaaaacrgattatacag

SEQ ID NO: 14678 - DNA, 21 bp, Homo sapiens
ccaaacacacygataacacag

SEQ ID NO: 14679 - DNA, 21 bp, Homo sapiens
aaggatgagarcagacattgc

SEQ ID NO: 14680 - DNA, 21 bp, Homo sapiens
actgtccatcmaatatagagg

SEQ ID NO: 14681 - DNA, 21 bp, Homo sapiens
aaaccgtgtcrtctaaaagga

SEQ ID NO: 14682 - DNA, 21 bp, Homo sapiens
cctgtatatcytctcagttga

SEQ ID NO: 14683 - DNA, 21 bp, Homo sapiens
aagaacaacakacagataatc

SEQ ID NO: 14684 - DNA, 21 bp, Homo sapiens
agaactggaayccatgatttt

SEQ ID NO: 14685 - DNA, 21 bp, Homo sapiens
ttctcgacttytttttttttt

SEQ ID NO: 14686 - DNA, 21 bp, Homo sapiens
ttaggaagccrgagacactgt

SEQ ID NO: 14687 - DNA, 21 bp, Homo sapiens
cctggctgtayataagaatca

SEQ ID NO: 14688 - DNA, 21 bp, Homo sapiens
cattcgcataygttatcttct

SEQ ID NO: 14689 - DNA, 21 bp, Homo sapiens
atttctattamtttttaggaa

SEQ ID NO: 14690 - DNA, 21 bp, Homo sapiens
atgtaatgatytctgtttttc

SEQ ID NO: 14691 - DNA, 21 bp, Homo sapiens
aagtattgaaraaggctccag

SEQ ID NO: 14692 - DNA, 21 bp, Homo sapiens
atcctatgacrgtctgaatgc

SEQ ID NO: 14693 - DNA, 21 bp, Homo sapiens
actgacaactytctttaaaag

SEQ ID NO: 14694 - DNA, 21 bp, Homo sapiens
tttaatttcayttgcttttga

SEQ ID NO: 14695 - DNA, 21 bp, Homo sapiens
cagtctgcacktcataattag

SEQ ID NO: 14696 - DNA, 21 bp, Homo sapiens
gcgacctctcmtaaactttgt

SEQ ID NO: 14697 - DNA, 21 bp, Homo sapiens
aagtatttacytcagttgagg

SEQ ID NO: 14698 - DNA, 21 bp, Homo sapiens
tctagcgtggygttagtgacc

SEQ ID NO: 14699 - DNA, 21 bp, Homo sapiens
catatcatcakccaccctttg

SEQ ID NO: 14700 - DNA, 21 bp, Homo sapiens
acattaataayataaaacatg

SEQ ID NO: 14701 - DNA, 21 bp, Homo sapiens
atgcaaattamcttcttgtca

SEQ ID NO: 14702 - DNA, 21 bp, Homo sapiens
attcagttctyctcactattc

SEQ ID NO: 14703 - DNA, 21 bp, Homo sapiens
gagcttcaaarccaataaaca

SEQ ID NO: 14704 - DNA, 21 bp, Homo sapiens
actcaacattrcctaaaaact

SEQ ID NO: 14705 - DNA, 21 bp, Homo sapiens
aaaataaataygtcccttgat

SEQ ID NO: 14706 - DNA, 21 bp, Homo sapiens
cataggaagamaatatgaaga

SEQ ID NO: 14707 - DNA, 21 bp, Homo sapiens
gtgacaggagktattctgttt

SEQ ID NO: 14708 - DNA, 21 bp, Homo sapiens
cctcttaaatyagaaacaaaa

SEQ ID NO: 14709 - DNA, 21 bp, Homo sapiens
acagttttatkccctgttgtg

SEQ ID NO: 14710 - DNA, 21 bp, Homo sapiens
atccaacataracagggtcac

SEQ ID NO: 14711 - DNA, 21 bp, Homo sapiens
ttatatttaaygtgttcttaa

SEQ ID NO: 14712 - DNA, 21 bp, Homo sapiens
gacccaattcytgtcctcaaa

SEQ ID NO: 14713 - DNA, 21 bp, Homo sapiens
attaatccagytgatcaattt

SEQ ID NO: 14714 - DNA, 21 bp, Homo sapiens
tggtaaaccartctgatgtgt

SEQ ID NO: 14715 - DNA, 21 bp, Homo sapiens
tcagtctcccraaatagtact

SEQ ID NO: 14716 - DNA, 21 bp, Homo sapiens
tcctagaaaaycccatgatgt

SEQ ID NO: 14717 - DNA, 21 bp, Homo sapiens
catattatgtrttaaaaacag

SEQ ID NO: 14718 - DNA, 21 bp, Homo sapiens
ttcagccctgmtctccatttt

SEQ ID NO: 14719 - DNA, 21 bp, Homo sapiens
gagcatggacyccctagacta

SEQ ID NO: 14720 - DNA, 21 bp, Homo sapiens
gaagccacagygtggcttagc

SEQ ID NO: 14721 - DNA, 21 bp, Homo sapiens
ttcctccctcygggaattttc

SEQ ID NO: 14722 - DNA, 21 bp, Homo sapiens
aagttgaattytggatttctt

SEQ ID NO: 14723 - DNA, 21 bp, Homo sapiens
ttacacccacrgcctcaacag

SEQ ID NO: 14724 - DNA, 21 bp, Homo sapiens
tgttaaacacyaaaggcaact

SEQ ID NO: 14725 - DNA, 21 bp, Homo sapiens
attttaaaacrtgcaggcctt

SEQ ID NO: 14726 - DNA, 21 bp, Homo sapiens
aaacctgtccrttgctaggcc

SEQ ID NO: 14727 - DNA, 21 bp, Homo sapiens
aaccaccatamaaagaggcag

SEQ ID NO: 14728 - DNA, 21 bp, Homo sapiens
tttgttattarccacctgagt

SEQ ID NO: 14729 - DNA, 21 bp, Homo sapiens
gataactaaayaaaatggttc

SEQ ID NO: 14730 - DNA, 21 bp, Homo sapiens
tcagtaaaacratcaaaaaga

SEQ ID NO: 14731 - DNA, 21 bp, Homo sapiens
tgaaggaaaaygatacgcaac

SEQ ID NO: 14732 - DNA, 21 bp, Homo sapiens
tttccttgccraagaaatatt

SEQ ID NO: 14733 - DNA, 21 bp, Homo sapiens
acttgacttaygtatcattct

SEQ ID NO: 14734 - DNA, 21 bp, Homo sapiens
tactttcactmgcagattata

SEQ ID NO: 14735 - DNA, 21 bp, Homo sapiens
acagagactcratgtagttaa

SEQ ID NO: 14736 - DNA, 21 bp, Homo sapiens
tgcttttcacrtgttgtatct

SEQ ID NO: 14737 - DNA, 21 bp, Homo sapiens
gacctcaaaamtccatgtgcc

SEQ ID NO: 14738 - DNA, 21 bp, Homo sapiens
aaagcgccacrtgataagaca

SEQ ID NO: 14739 - DNA, 21 bp, Homo sapiens
taggttcctgyccatctatct

SEQ ID NO: 14740 - DNA, 21 bp, Homo sapiens
tcttccctagyctacttttaa

SEQ ID NO: 14741 - DNA, 21 bp, Homo sapiens
aattaaacacrtaattaaatg

SEQ ID NO: 14742 - DNA, 21 bp, Homo sapiens
aaagctgatcyacacattgct

SEQ ID NO: 14743 - DNA, 21 bp, Homo sapiens
ttccctgtgargtcccatcta

SEQ ID NO: 14744 - DNA, 21 bp, Homo sapiens
tgagaaaaagragatcccaat

SEQ ID NO: 14745 - DNA, 21 bp, Homo sapiens
cttggcccttrtggaaacaac

SEQ ID NO: 14746 - DNA, 21 bp, Homo sapiens
atcaccagtcmtatgttcttt

SEQ ID NO: 14747 - DNA, 21 bp, Homo sapiens
tttcgtatctygggataccta

SEQ ID NO: 14748 - DNA, 21 bp, Homo sapiens
aagcaagctcygaagggctaa

SEQ ID NO: 14749 - DNA, 21 bp, Homo sapiens
cagagaaatcrttaagacagt

SEQ ID NO: 14750 - DNA, 21 bp, Homo sapiens
tctggctggcrcttatcctcg

SEQ ID NO: 14751 - DNA, 21 bp, Homo sapiens
atatgtatccrtgtattgtgt

SEQ ID NO: 14752 - DNA, 21 bp, Homo sapiens
aaacaaagacrgcccctgtct

SEQ ID NO: 14753 - DNA, 21 bp, Homo sapiens
ccccgttcctyccctgtcagt

SEQ ID NO: 14754 - DNA, 21 bp, Homo sapiens
cagggctgtgyttttgtgtga

SEQ ID NO: 14755 - DNA, 21 bp, Homo sapiens
ggttctctgtytgccttgtag

SEQ ID NO: 14756 - DNA, 21 bp, Homo sapiens
aaggggacatmattgtgtaaa

SEQ ID NO: 14757 - DNA, 21 bp, Homo sapiens
taccctctgarcactagaggt

SEQ ID NO: 14758 - DNA, 21 bp, Homo sapiens
taacatcatarcctgtttcct

SEQ ID NO: 14759 - DNA, 21 bp, Homo sapiens
ctgcagcattrctgcttcaca

SEQ ID NO: 14760 - DNA, 21 bp, Homo sapiens
gatgggattcygtcatcatca

SEQ ID NO: 14761 - DNA, 21 bp, Homo sapiens
gcgactgactrtagatggctt

SEQ ID NO: 14762 - DNA, 21 bp, Homo sapiens
ccccagttggrcctactcttc

SEQ ID NO: 14763 - DNA, 21 bp, Homo sapiens
ccttcatggcrctttctggct

SEQ ID NO: 14764 - DNA, 21 bp, Homo sapiens
ttgtttttacmaagtcaaaat

SEQ ID NO: 14765 - DNA, 21 bp, Homo sapiens
ttttgggcacrtctgtgcatt

SEQ ID NO: 14766 - DNA, 21 bp, Homo sapiens
gggagtagcartagtcttctt

SEQ ID NO: 14767 - DNA, 21 bp, Homo sapiens
tattttttttygtgatcatta

SEQ ID NO: 14768 - DNA, 21 bp, Homo sapiens
tgaagttcacrttctagctgt

SEQ ID NO: 14769 - DNA, 21 bp, Homo sapiens
tttcttttaaygggtcacttt

SEQ ID NO: 14770 - DNA, 21 bp, Homo sapiens
ggaaaagcacygtttataggg

SEQ ID NO: 14771 - DNA, 21 bp, Homo sapiens
tgttatggccrctccaggaaa

SEQ ID NO: 14772 - DNA, 21 bp, Homo sapiens
cctgtaccatrttatttaatt

SEQ ID NO: 14773 - DNA, 21 bp, Homo sapiens
tgattaacttyacactattaa

SEQ ID NO: 14774 - DNA, 21 bp, Homo sapiens
atatgtttgcrtaaaaactgt

SEQ ID NO: 14775 - DNA, 21 bp, Homo sapiens
ataaaaaatakatacatggac

SEQ ID NO: 14776 - DNA, 21 bp, Homo sapiens
ggtatgaaagrgagaggaaga

SEQ ID NO: 14777 - DNA, 21 bp, Homo sapiens
aacagcagctrctgtggtgaa

SEQ ID NO: 14778 - DNA, 21 bp, Homo sapiens
cataattcctrcaacttgtta

SEQ ID NO: 14779 - DNA, 21 bp, Homo sapiens
ggccctaaccrgaatcctggc

SEQ ID NO: 14780 - DNA, 21 bp, Homo sapiens
tctgaaaagamaaaaaaaaac

SEQ ID NO: 14781 - DNA, 21 bp, Homo sapiens
agctactctcyggccgtttct

SEQ ID NO: 14782 - DNA, 21 bp, Homo sapiens
agaaggctagmgttttcagaa

SEQ ID NO: 14783 - DNA, 21 bp, Homo sapiens
tacgagggaarcagtacaacc

SEQ ID NO: 14784 - DNA, 21 bp, Homo sapiens
acattcacatmccacgaaaac

SEQ ID NO: 14785 - DNA, 21 bp, Homo sapiens
tcttaaatatyctgtcttctc

SEQ ID NO: 14786 - DNA, 21 bp, Homo sapiens
caagaaagttkttattacgca

SEQ ID NO: 14787 - DNA, 21 bp, Homo sapiens
tttttagtgamgaacaataat

SEQ ID NO: 14788 - DNA, 21 bp, Homo sapiens
gtgcctgtccrctctttactt

SEQ ID NO: 14789 - DNA, 21 bp, Homo sapiens
tagcctgggaygcttgctcag

SEQ ID NO: 14790 - DNA, 21 bp, Homo sapiens
acagagggtckttatttctgg

SEQ ID NO: 14791 - DNA, 21 bp, Homo sapiens
atcaaactcaygaggattgcc

SEQ ID NO: 14792 - DNA, 21 bp, Homo sapiens
tcttccggggmcttcgcatcc

SEQ ID NO: 14793 - DNA, 21 bp, Homo sapiens
ccacaatccaygtgtgaaaga

SEQ ID NO: 14794 - DNA, 21 bp, Homo sapiens
gttgagccacrtctgtgagaa

SEQ ID NO: 14795 - DNA, 21 bp, Homo sapiens
tcagtctaacrgtacagctac

SEQ ID NO: 14796 - DNA, 21 bp, Homo sapiens
gcaccctagtyagtttcacgc

SEQ ID NO: 14797 - DNA, 21 bp, Homo sapiens
ggtgacagagrggggctgtgc

SEQ ID NO: 14798 - DNA, 21 bp, Homo sapiens
acagcctccaycttcaaaaaa

SEQ ID NO: 14799 - DNA, 21 bp, Homo sapiens
agcagaaaggrctggactaag

SEQ ID NO: 14800 - DNA, 21 bp, Homo sapiens
gtttaaaatgmgtaggatctg

SEQ ID NO: 14801 - DNA, 21 bp, Homo sapiens
tacattttttyagtttagtga

SEQ ID NO: 14802 - DNA, 21 bp, Homo sapiens
cataaccagaygacctaactt

SEQ ID NO: 14803 - DNA, 21 bp, Homo sapiens
gtactgaccaygtcgctgttc

SEQ ID NO: 14804 - DNA, 21 bp, Homo sapiens
tcagttgagcraagaccagga

SEQ ID NO: 14805 - DNA, 21 bp, Homo sapiens
tataaatgtaytgagggttgg

SEQ ID NO: 14806 - DNA, 21 bp, Homo sapiens
aactgttaatrcaatgacatc

SEQ ID NO: 14807 - DNA, 21 bp, Homo sapiens
ctgcactccartgttgtgatt

SEQ ID NO: 14808 - DNA, 21 bp, Homo sapiens
tctgtcaaaaytcaatttaag

SEQ ID NO: 14809 - DNA, 21 bp, Homo sapiens
ataattatcargttatcgaat

SEQ ID NO: 14810 - DNA, 21 bp, Homo sapiens
aatggtgcatrtaacatctcc

SEQ ID NO: 14811 - DNA, 21 bp, Homo sapiens
gatgaatttgraacccacatt

SEQ ID NO: 14812 - DNA, 21 bp, Homo sapiens
tggattagatrggctgtgaaa

SEQ ID NO: 14813 - DNA, 21 bp, Homo sapiens
ttgcttactcyctcaccatgc

SEQ ID NO: 14814 - DNA, 21 bp, Homo sapiens
gtgattttagmgtttaggaga

SEQ ID NO: 14815 - DNA, 21 bp, Homo sapiens
aatcagataaycttaaaatag

SEQ ID NO: 14816 - DNA, 21 bp, Homo sapiens
gaaatataatyctatgtgcaa

SEQ ID NO: 14817 - DNA, 21 bp, Homo sapiens
cagttttgaarcaaatcgtaa

SEQ ID NO: 14818 - DNA, 21 bp, Homo sapiens
acaaaaagtcygcaccaaata

SEQ ID NO: 14819 - DNA, 21 bp, Homo sapiens
ttctcttttcratggcataat

SEQ ID NO: 14820 - DNA, 21 bp, Homo sapiens
ttggctattaygaataatgtt

SEQ ID NO: 14821 - DNA, 21 bp, Homo sapiens
tttttcacttycctatttcac

SEQ ID NO: 14822 - DNA, 21 bp, Homo sapiens
tttatgataakaaaatgtgct

SEQ ID NO: 14823 - DNA, 21 bp, Homo sapiens
agtgtaacagkataaattatg

SEQ ID NO: 14824 - DNA, 21 bp, Homo sapiens
ctaagtcaaaktacctcaggg

SEQ ID NO: 14825 - DNA, 21 bp, Homo sapiens
ttctattggcrgcagtaaaat

SEQ ID NO: 14826 - DNA, 21 bp, Homo sapiens
cggagccaagmctagaaatca

SEQ ID NO: 14827 - DNA, 21 bp, Homo sapiens
ctgagcaagaytgcagtgagc

SEQ ID NO: 14828 - DNA, 21 bp, Homo sapiens
gcatcctaaayttagtatgtt

SEQ ID NO: 14829 - DNA, 21 bp, Homo sapiens
ttgttgaaaaygacaggattt

SEQ ID NO: 14830 - DNA, 21 bp, Homo sapiens
catgtttaaargatatctttt

SEQ ID NO: 14831 - DNA, 21 bp, Homo sapiens
attttttccamggatatgtta

SEQ ID NO: 14832 - DNA, 21 bp, Homo sapiens
agtctaaactraggtagtaat

SEQ ID NO: 14833 - DNA, 21 bp, Homo sapiens
cattggccacycttggctaca

SEQ ID NO: 14834 - DNA, 21 bp, Homo sapiens
ttgaaatatgytagcctcttc

SEQ ID NO: 14835 - DNA, 21 bp, Homo sapiens
gctggacatckgggctttaag

SEQ ID NO: 14836 - DNA, 21 bp, Homo sapiens
gttaaagaackagtttagtag

SEQ ID NO: 14837 - DNA, 21 bp, Homo sapiens
atatttttccyagtgtgattt

SEQ ID NO: 14838 - DNA, 21 bp, Homo sapiens
taaagctctgytgacttgtga

SEQ ID NO: 14839 - DNA, 21 bp, Homo sapiens
ttttccaagcrtagaacacaa

SEQ ID NO: 14840 - DNA, 21 bp, Homo sapiens
tcagtaactayaaggattatg

SEQ ID NO: 14841 - DNA, 21 bp, Homo sapiens
tgggatggaayaggcaaagaa

SEQ ID NO: 14842 - DNA, 21 bp, Homo sapiens
cttcctagttkgtttctggca

SEQ ID NO: 14843 - DNA, 21 bp, Homo sapiens
acaaatctgtrttgttattca

SEQ ID NO: 14844 - DNA, 21 bp, Homo sapiens
aactctgatamtagttactga

SEQ ID NO: 14845 - DNA, 21 bp, Homo sapiens
gtggtacctarttttcttggc

SEQ ID NO: 14846 - DNA, 21 bp, Homo sapiens
atgcagagatyaagcccaaca

SEQ ID NO: 14847 - DNA, 21 bp, Homo sapiens
tgttgggagaytatcttggtt

SEQ ID NO: 14848 - DNA, 21 bp, Homo sapiens
ataaattaaaratgctaaaaa

SEQ ID NO: 14849 - DNA, 21 bp, Homo sapiens
cagtctcatcyatcccactcc

SEQ ID NO: 14850 - DNA, 21 bp, Homo sapiens
tcagccagtayatatattaaa

SEQ ID NO: 14851 - DNA, 21 bp, Homo sapiens
ttagacagatyatatctattg

SEQ ID NO: 14852 - DNA, 21 bp, Homo sapiens
ttgttcgtttytcttggatgg

SEQ ID NO: 14853 - DNA, 21 bp, Homo sapiens
tagctgaaaaytgaggtgaga

SEQ ID NO: 14854 - DNA, 21 bp, Homo sapiens
tcagttctgtrttatttacaa

SEQ ID NO: 14855 - DNA, 21 bp, Homo sapiens
actcaagatcyattttggtag

SEQ ID NO: 14856 - DNA, 21 bp, Homo sapiens
ttggagggggragatgaaaaa

SEQ ID NO: 14857 - DNA, 21 bp, Homo sapiens
ctcatttagtyggtgtgtagt

SEQ ID NO: 14858 - DNA, 21 bp, Homo sapiens
gccactggtgmatggcccata

SEQ ID NO: 14859 - DNA, 21 bp, Homo sapiens
aaaaaatcttmatcaagaaat

SEQ ID NO: 14860 - DNA, 21 bp, Homo sapiens
agttatgcttyacataaatta

SEQ ID NO: 14861 - DNA, 21 bp, Homo sapiens
agctcaaataytccaaataac

SEQ ID NO: 14862 - DNA, 21 bp, Homo sapiens
agaagcttaartgctgttaaa

SEQ ID NO: 14863 - DNA, 21 bp, Homo sapiens
ggctaagaggmcacctcagaa

SEQ ID NO: 14864 - DNA, 21 bp, Homo sapiens
gaaactacctyattggagcaa

SEQ ID NO: 14865 - DNA, 21 bp, Homo sapiens
aaaagtaaacmcatctgtgca

SEQ ID NO: 14866 - DNA, 21 bp, Homo sapiens
caagaattgaytcatcattac

SEQ ID NO: 14867 - DNA, 21 bp, Homo sapiens
attgcgggaaragaaagcttg

SEQ ID NO: 14868 - DNA, 21 bp, Homo sapiens
taacaaagaaygcaataagtc

SEQ ID NO: 14869 - DNA, 21 bp, Homo sapiens
ccaggcttctytgatttccct

SEQ ID NO: 14870 - DNA, 21 bp, Homo sapiens
gatgcacctcrtttgttgtca

SEQ ID NO: 14871 - DNA, 21 bp, Homo sapiens
aataattaaaragaacaaaga

SEQ ID NO: 14872 - DNA, 21 bp, Homo sapiens
cagcaatctgkcctcccaagc

SEQ ID NO: 14873 - DNA, 21 bp, Homo sapiens
gaagtcacccrcttgccggat

SEQ ID NO: 14874 - DNA, 21 bp, Homo sapiens
catcaaggagygctctgtcag

SEQ ID NO: 14875 - DNA, 21 bp, Homo sapiens
gctttcatgtrcatagagctt

SEQ ID NO: 14876 - DNA, 21 bp, Homo sapiens
ccaccagtgcyttccccctaa

SEQ ID NO: 14877 - DNA, 21 bp, Homo sapiens
ttttgtgctgytgcgttgatc

SEQ ID NO: 14878 - DNA, 21 bp, Homo sapiens
ttcataccagytgggtttcat

SEQ ID NO: 14879 - DNA, 21 bp, Homo sapiens
aatggcttaaygaaagaatga

SEQ ID NO: 14880 - DNA, 21 bp, Homo sapiens
ttggttgcaaytcaccaaact

SEQ ID NO: 14881 - DNA, 21 bp, Homo sapiens
acatacatccrtccccttcta

SEQ ID NO: 14882 - DNA, 21 bp, Homo sapiens
ggtcttcccgygccggaccac

SEQ ID NO: 14883 - DNA, 21 bp, Homo sapiens
aacacctcctyggggtcccgc

SEQ ID NO: 14884 - DNA, 21 bp, Homo sapiens
atccacatgcmataaccacta

SEQ ID NO: 14885 - DNA, 21 bp, Homo sapiens
gttggtatccytaaaagccaa

SEQ ID NO: 14886 - DNA, 21 bp, Homo sapiens
agaagtggccratctggaagc

SEQ ID NO: 14887 - DNA, 21 bp, Homo sapiens
agtcaatatcrgtatcagatt

SEQ ID NO: 14888 - DNA, 21 bp, Homo sapiens
cacaaacataygtacataaat

SEQ ID NO: 14889 - DNA, 21 bp, Homo sapiens
gtctacaattraaaaaccttc

SEQ ID NO: 14890 - DNA, 21 bp, Homo sapiens
tatatacacayggtgagtcat

SEQ ID NO: 14891 - DNA, 21 bp, Homo sapiens
tggctgtggayctgaacctac

SEQ ID NO: 14892 - DNA, 21 bp, Homo sapiens
gattaagttgmcatttaagtg

SEQ ID NO: 14893 - DNA, 21 bp, Homo sapiens
aagtctccacrtagatctaaa

SEQ ID NO: 14894 - DNA, 21 bp, Homo sapiens
aagccttccaracccaaagga

SEQ ID NO: 14895 - DNA, 21 bp, Homo sapiens
gatttaataayaaaaatatgg

SEQ ID NO: 14896 - DNA, 21 bp, Homo sapiens
tgagataagayggtccctccc

SEQ ID NO: 14897 - DNA, 21 bp, Homo sapiens
agaaatacctyggcaatgggc

SEQ ID NO: 14898 - DNA, 21 bp, Homo sapiens
tccactattcratgttttgta

SEQ ID NO: 14899 - DNA, 21 bp, Homo sapiens
aagctttagtyaagcctagat

SEQ ID NO: 14900 - DNA, 21 bp, Homo sapiens
actaaagtaakaggtagagac

SEQ ID NO: 14901 - DNA, 21 bp, Homo sapiens
ctcagtcctcrgctgtagcaa

SEQ ID NO: 14902 - DNA, 21 bp, Homo sapiens
ttggttcttcyacccctttat

SEQ ID NO: 14903 - DNA, 21 bp, Homo sapiens
cttctatagcyatgtattcta

SEQ ID NO: 14904 - DNA, 21 bp, Homo sapiens
gcacacattcrttggcggttt

SEQ ID NO: 14905 - DNA, 21 bp, Homo sapiens
gtatgttctcrtttctttaaa

SEQ ID NO: 14906 - DNA, 21 bp, Homo sapiens
taagaattatrtcagaaatgg

SEQ ID NO: 14907 - DNA, 21 bp, Homo sapiens
tccttgacatyattctatccc

SEQ ID NO: 14908 - DNA, 21 bp, Homo sapiens
gcagagatatrtgtactttgc

SEQ ID NO: 14909 - DNA, 21 bp, Homo sapiens
acacttttatktaggattttg

SEQ ID NO: 14910 - DNA, 21 bp, Homo sapiens
cactattatcrgttcaaggac

SEQ ID NO: 14911 - DNA, 21 bp, Homo sapiens
tacagtgtatyccatcaccct

SEQ ID NO: 14912 - DNA, 21 bp, Homo sapiens
ttaaggttggrtgagagataa

SEQ ID NO: 14913 - DNA, 21 bp, Homo sapiens
aagccaaggtragaggatcac

SEQ ID NO: 14914 - DNA, 21 bp, Homo sapiens
aaatacgcaartgatagcagg

SEQ ID NO: 14915 - DNA, 21 bp, Homo sapiens
gatgggggggraaaagaacct

SEQ ID NO: 14916 - DNA, 21 bp, Homo sapiens
cactcacaaayggttgcttgt

SEQ ID NO: 14917 - DNA, 21 bp, Homo sapiens
cactactaccraaaggattgg

SEQ ID NO: 14918 - DNA, 21 bp, Homo sapiens
aataatattcygtgagtctgc

SEQ ID NO: 14919 - DNA, 21 bp, Homo sapiens
ggtaagtaacyttgaaatcat

SEQ ID NO: 14920 - DNA, 21 bp, Homo sapiens
tcattaagcgrtaaagaagac

SEQ ID NO: 14921 - DNA, 21 bp, Homo sapiens
ctcctcacccraatcaggggc

SEQ ID NO: 14922 - DNA, 21 bp, Homo sapiens
ctgtcaagggmaacattcaaa

SEQ ID NO: 14923 - DNA, 21 bp, Homo sapiens
tatccagccgrcaaaaggatc

SEQ ID NO: 14924 - DNA, 21 bp, Homo sapiens
agggctttatrgcaatcaggc

SEQ ID NO: 14925 - DNA, 21 bp, Homo sapiens
ctagtccaccyggctccagcc

SEQ ID NO: 14926 - DNA, 21 bp, Homo sapiens
agccgtcaagmgtgcatctca

SEQ ID NO: 14927 - DNA, 21 bp, Homo sapiens
ctgtgatgccrtcagctcact

SEQ ID NO: 14928 - DNA, 21 bp, Homo sapiens
aatttatacaytcatatcatg

SEQ ID NO: 14929 - DNA, 21 bp, Homo sapiens
catgttttacraagtaggaat

SEQ ID NO: 14930 - DNA, 21 bp, Homo sapiens
actaaacagarttaagccaca

SEQ ID NO: 14931 - DNA, 21 bp, Homo sapiens
tagccttaccrtgggcttaaa

SEQ ID NO: 14932 - DNA, 21 bp, Homo sapiens
gaaggggtctrtacactctct

SEQ ID NO: 14933 - DNA, 21 bp, Homo sapiens
ctacttagagrgaaatttact

SEQ ID NO: 14934 - DNA, 21 bp, Homo sapiens
aactagtaacmactcttactc

SEQ ID NO: 14935 - DNA, 21 bp, Homo sapiens
tcaaaagatamttgaaaaaat

SEQ ID NO: 14936 - DNA, 21 bp, Homo sapiens
ttgtatcagcytattttctac

SEQ ID NO: 14937 - DNA, 21 bp, Homo sapiens
caaaaaactcytcgttgattt

SEQ ID NO: 14938 - DNA, 21 bp, Homo sapiens
ttcctgctgcygttaaacagc

SEQ ID NO: 14939 - DNA, 21 bp, Homo sapiens
aattgcttttyatttaaaaaa

SEQ ID NO: 14940 - DNA, 21 bp, Homo sapiens
gctattatttyttcatgctgt

SEQ ID NO: 14941 - DNA, 21 bp, Homo sapiens
cacttaaaagrcacaaagtgg

SEQ ID NO: 14942 - DNA, 21 bp, Homo sapiens
gcatggggaaratcctctcac

SEQ ID NO: 14943 - DNA, 21 bp, Homo sapiens
ataaacaacaygaatatccta

SEQ ID NO: 14944 - DNA, 21 bp, Homo sapiens
cccaaacgcaygcatatatac

SEQ ID NO: 14945 - DNA, 21 bp, Homo sapiens
cagagcttacmgtctggcaag

SEQ ID NO: 14946 - DNA, 21 bp, Homo sapiens
tggatgcattyagttgtttcc

SEQ ID NO: 14947 - DNA, 21 bp, Homo sapiens
agtaccatagygtggataata

SEQ ID NO: 14948 - DNA, 21 bp, Homo sapiens
atatgtaggartgccctttgg

SEQ ID NO: 14949 - DNA, 21 bp, Homo sapiens
tccttttgagrgatctatttt

SEQ ID NO: 14950 - DNA, 21 bp, Homo sapiens
tctattattaragtacatgat

SEQ ID NO: 14951 - DNA, 21 bp, Homo sapiens
agataatatgyatctgaaatt

SEQ ID NO: 14952 - DNA, 21 bp, Homo sapiens
gtgaacttccrtctttagttg

SEQ ID NO: 14953 - DNA, 21 bp, Homo sapiens
ctgggctcttrtgaagatgta

SEQ ID NO: 14954 - DNA, 21 bp, Homo sapiens
tgatcttgtayggaggggaat

SEQ ID NO: 14955 - DNA, 21 bp, Homo sapiens
tggacaaatcyaccttaatag

SEQ ID NO: 14956 - DNA, 21 bp, Homo sapiens
agcactggaartggtaaatat

SEQ ID NO: 14957 - DNA, 21 bp, Homo sapiens
tccctactgaygaagaatgtg

SEQ ID NO: 14958 - DNA, 21 bp, Homo sapiens
gcaccatttcyggaggaaata

SEQ ID NO: 14959 - DNA, 21 bp, Homo sapiens
aggccaaagarcggaggtcaa

SEQ ID NO: 14960 - DNA, 21 bp, Homo sapiens
atgtcattctytaaaaaatta

SEQ ID NO: 14961 - DNA, 21 bp, Homo sapiens
ttctaaaataytaatttgtag

SEQ ID NO: 14962 - DNA, 21 bp, Homo sapiens
aaaacttcatkagaaaaagac

SEQ ID NO: 14963 - DNA, 21 bp, Homo sapiens
tgatttcaacytgataatgtg

SEQ ID NO: 14964 - DNA, 21 bp, Homo sapiens
gtataacccarggttcagatt

SEQ ID NO: 14965 - DNA, 21 bp, Homo sapiens
gaattctaaaygtggtgaaac

SEQ ID NO: 14966 - DNA, 21 bp, Homo sapiens
cctttccataytaggcctttc

SEQ ID NO: 14967 - DNA, 21 bp, Homo sapiens
ttaaaagttcrccttcttagt

SEQ ID NO: 14968 - DNA, 21 bp, Homo sapiens
tctctatcatygtagcaagtt

SEQ ID NO: 14969 - DNA, 21 bp, Homo sapiens
tggaggttggrgagcacagaa

SEQ ID NO: 14970 - DNA, 21 bp, Homo sapiens
gcaaaactaaycttgagattt

SEQ ID NO: 14971 - DNA, 21 bp, Homo sapiens
cattggctatrggcaaagttt

SEQ ID NO: 14972 - DNA, 21 bp, Homo sapiens
gttcgtttctycatatccttg

SEQ ID NO: 14973 - DNA, 21 bp, Homo sapiens
tagccattcayatcttagttg

SEQ ID NO: 14974 - DNA, 21 bp, Homo sapiens
ttaatttaccraatcatttac

SEQ ID NO: 14975 - DNA, 21 bp, Homo sapiens
ctgagattccrataacaactg

SEQ ID NO: 14976 - DNA, 21 bp, Homo sapiens
tgctcacacayttcccaattc

SEQ ID NO: 14977 - DNA, 21 bp, Homo sapiens
taaaaataggyttgtgccagg

SEQ ID NO: 14978 - DNA, 21 bp, Homo sapiens
atcacaccaarcctttattta

SEQ ID NO: 14979 - DNA, 21 bp, Homo sapiens
aatttattccytatttaattc

SEQ ID NO: 14980 - DNA, 21 bp, Homo sapiens
gatatcacacrtttcaatctt

SEQ ID NO: 14981 - DNA, 21 bp, Homo sapiens
ctacatttccyacagcctctg

SEQ ID NO: 14982 - DNA, 21 bp, Homo sapiens
cgaaaaggtcrggatgacgaa

SEQ ID NO: 14983 - DNA, 21 bp, Homo sapiens
tatgggagccyaaagcttggg

SEQ ID NO: 14984 - DNA, 21 bp, Homo sapiens
gggacctgcayaaaattaaga

SEQ ID NO: 14985 - DNA, 21 bp, Homo sapiens
atgcctctccractgcttcac

SEQ ID NO: 14986 - DNA, 21 bp, Homo sapiens
tctgcaatttycccttctgtc

SEQ ID NO: 14987 - DNA, 21 bp, Homo sapiens
ggggaaagcartttgtttaac

SEQ ID NO: 14988 - DNA, 21 bp, Homo sapiens
gatgatggtgrtttagactag

SEQ ID NO: 14989 - DNA, 21 bp, Homo sapiens
cccacacacaycagttccatt

SEQ ID NO: 14990 - DNA, 21 bp, Homo sapiens
tcttggctccrtaacaggact

SEQ ID NO: 14991 - DNA, 21 bp, Homo sapiens
cctaggtttgrtgagccacat

SEQ ID NO: 14992 - DNA, 21 bp, Homo sapiens
ggtcaatcacrcacaagaaag

SEQ ID NO: 14993 - DNA, 21 bp, Homo sapiens
aatcatggaartcatgcacag

SEQ ID NO: 14994 - DNA, 21 bp, Homo sapiens
gaacatgaagrgccttatagg

SEQ ID NO: 14995 - DNA, 21 bp, Homo sapiens
ttccacattartaataataat

SEQ ID NO: 14996 - DNA, 21 bp, Homo sapiens
gtactaactgyacatgcaaca

SEQ ID NO: 14997 - DNA, 21 bp, Homo sapiens
ggaaacatttrtttgccctaa

SEQ ID NO: 14998 - DNA, 21 bp, Homo sapiens
tggaaacctcraagctacatc

SEQ ID NO: 14999 - DNA, 21 bp, Homo sapiens
gggcatctccygcttcctcta

SEQ ID NO: 15000 - DNA, 21 bp, Homo sapiens
ttatgtccacktggggagata

SEQ ID NO: 15001 - DNA, 21 bp, Homo sapiens
cacaagagcgrggtcatctga

SEQ ID NO: 15002 - DNA, 21 bp, Homo sapiens
taggcaaacaygacaggttag

SEQ ID NO: 15003 - DNA, 21 bp, Homo sapiens
catatgactaygagtggaatt

SEQ ID NO: 15004 - DNA, 21 bp, Homo sapiens
attaaattcamgtagaaggat

SEQ ID NO: 15005 - DNA, 21 bp, Homo sapiens
aggagaacccrtgctgaagag

SEQ ID NO: 15006 - DNA, 21 bp, Homo sapiens
agggcagcccmaaacaataac

SEQ ID NO: 15007 - DNA, 21 bp, Homo sapiens
tggccagctcraaacacaaaa

SEQ ID NO: 15008 - DNA, 21 bp, Homo sapiens
aactcggggaygctgcccagc

SEQ ID NO: 15009 - DNA, 21 bp, Homo sapiens
acgacgcaggyggctgtctga

SEQ ID NO: 15010 - DNA, 21 bp, Homo sapiens
atgaccgtcamaccgtcagca

SEQ ID NO: 15011 - DNA, 21 bp, Homo sapiens
taaccttacgratattccctt

SEQ ID NO: 15012 - DNA, 21 bp, Homo sapiens
ggctctttgargcatgcatga

SEQ ID NO: 15013 - DNA, 21 bp, Homo sapiens
tgtggtgctcrgtaacaacca

SEQ ID NO: 15014 - DNA, 21 bp, Homo sapiens
tcgagtggctmgctcatgggt

SEQ ID NO: 15015 - DNA, 21 bp, Homo sapiens
cagaataggtygagagaggac

SEQ ID NO: 15016 - DNA, 21 bp, Homo sapiens
cgtaaggaagytgatgtatct

SEQ ID NO: 15017 - DNA, 21 bp, Homo sapiens
tattagctccrtatctgtggg

SEQ ID NO: 15018 - DNA, 21 bp, Homo sapiens
acagttggtgrttaggaaaag

SEQ ID NO: 15019 - DNA, 21 bp, Homo sapiens
cagtctctgcyccggggcctg

SEQ ID NO: 15020 - DNA, 21 bp, Homo sapiens
cactgtggtcrtttgtatccc

SEQ ID NO: 15021 - DNA, 21 bp, Homo sapiens
acaggtacagragaatgagcg

SEQ ID NO: 15022 - DNA, 21 bp, Homo sapiens
cataatatatyaaaaccatgt

SEQ ID NO: 15023 - DNA, 21 bp, Homo sapiens
acagaaacatkaaaagttaaa

SEQ ID NO: 15024 - DNA, 21 bp, Homo sapiens
aattagtacartatattgcat

SEQ ID NO: 15025 - DNA, 21 bp, Homo sapiens
gaagttttctrtgatctgctt

SEQ ID NO: 15026 - DNA, 21 bp, Homo sapiens
aagggaagaaytgtcaaataa

SEQ ID NO: 15027 - DNA, 21 bp, Homo sapiens
gactttgagarctttgtgtgc

SEQ ID NO: 15028 - DNA, 21 bp, Homo sapiens
cacccagggcrgactttggcc

SEQ ID NO: 15029 - DNA, 21 bp, Homo sapiens
cacgtttctgyttctctcttc

SEQ ID NO: 15030 - DNA, 21 bp, Homo sapiens
attgaaaataytagaaattgt

SEQ ID NO: 15031 - DNA, 21 bp, Homo sapiens
gacttggtgtycatgtctgtg

SEQ ID NO: 15032 - DNA, 21 bp, Homo sapiens
accccgcagcrcacgctgata

SEQ ID NO: 15033 - DNA, 21 bp, Homo sapiens
aggctcgcaamcaaatgcaga

SEQ ID NO: 15034 - DNA, 21 bp, Homo sapiens
gacatccccaytcacgctgtg

SEQ ID NO: 15035 - DNA, 21 bp, Homo sapiens
taatgtgcagkaattccttgc

SEQ ID NO: 15036 - DNA, 21 bp, Homo sapiens
atgtggtgccyacgtcatgaa

SEQ ID NO: 15037 - DNA, 21 bp, Homo sapiens
aactgcacaayaatgcatgct

SEQ ID NO: 15038 - DNA, 21 bp, Homo sapiens
ccaatttctgycaagacatct

SEQ ID NO: 15039 - DNA, 21 bp, Homo sapiens
gacgtaagcgrtattttgagc

SEQ ID NO: 15040 - DNA, 21 bp, Homo sapiens
tatacagtgtracaacatgct

SEQ ID NO: 15041 - DNA, 21 bp, Homo sapiens
aatatggtcayagttaccctg

SEQ ID NO: 15042 - DNA, 21 bp, Homo sapiens
cagctgaaaayggatcaagga

SEQ ID NO: 15043 - DNA, 21 bp, Homo sapiens
agtcttttgcrtctccatcta

SEQ ID NO: 15044 - DNA, 21 bp, Homo sapiens
cacacaaaccrcattatttca

SEQ ID NO: 15045 - DNA, 21 bp, Homo sapiens
aatctgagccrgcatcttcag

SEQ ID NO: 15046 - DNA, 21 bp, Homo sapiens
atctctcccgractaccagag

SEQ ID NO: 15047 - DNA, 21 bp, Homo sapiens
gtgctcaactkggggagtggg

SEQ ID NO: 15048 - DNA, 21 bp, Homo sapiens
aatctggtatygcactgtccc

SEQ ID NO: 15049 - DNA, 21 bp, Homo sapiens
tgtgaggaatkatatcgagta

SEQ ID NO: 15050 - DNA, 21 bp, Homo sapiens
tggaagcgttmctgcgtgtat

SEQ ID NO: 15051 - DNA, 21 bp, Homo sapiens
tctgtatgtaygtttaaggtc

SEQ ID NO: 15052 - DNA, 21 bp, Homo sapiens
ctagcattgarctatagttca

SEQ ID NO: 15053 - DNA, 21 bp, Homo sapiens
atgtttgcatkcagacttttg

SEQ ID NO: 15054 - DNA, 21 bp, Homo sapiens
gcggcgggcgyaccggcttcc

SEQ ID NO: 15055 - DNA, 21 bp, Homo sapiens
tgggttccgtrccccgtgtgt

SEQ ID NO: 15056 - DNA, 21 bp, Homo sapiens
tagaaaacggycttacattta

SEQ ID NO: 15057 - DNA, 21 bp, Homo sapiens
ttgtcagcgtygctgagacag

SEQ ID NO: 15058 - DNA, 21 bp, Homo sapiens
ccacattgagktaatacttaa

SEQ ID NO: 15059 - DNA, 21 bp, Homo sapiens
atcagcatccrttcagttgac

SEQ ID NO: 15060 - DNA, 21 bp, Homo sapiens
ctcctccgctygatcccattg

SEQ ID NO: 15061 - DNA, 21 bp, Homo sapiens
cgaaaggcacmtttttaggca

SEQ ID NO: 15062 - DNA, 21 bp, Homo sapiens
caattatttayttttagatta

SEQ ID NO: 15063 - DNA, 21 bp, Homo sapiens
ctgtccctgtrttcatgagtg

SEQ ID NO: 15064 - DNA, 21 bp, Homo sapiens
ctcccgggacyggacaaactg

SEQ ID NO: 15065 - DNA, 21 bp, Homo sapiens
gaattactaarcagctcctca

SEQ ID NO: 15066 - DNA, 21 bp, Homo sapiens
gcaaagacagygagtgcacaa

SEQ ID NO: 15067 - DNA, 21 bp, Homo sapiens
agtggtcctgygatgaaaaag

SEQ ID NO: 15068 - DNA, 21 bp, Homo sapiens
tattcttctgycacacactcc

SEQ ID NO: 15069 - DNA, 21 bp, Homo sapiens
ggaaaagttaraggcataaag

SEQ ID NO: 15070 - DNA, 21 bp, Homo sapiens
gtagtttcacyggataagaac

SEQ ID NO: 15071 - DNA, 21 bp, Homo sapiens
agaaaagccamaaggaggctc

SEQ ID NO: 15072 - DNA, 21 bp, Homo sapiens
agaggaattayatgagcctgt

SEQ ID NO: 15073 - DNA, 21 bp, Homo sapiens
gtggcctaatrgttagacgaa

SEQ ID NO: 15074 - DNA, 21 bp, Homo sapiens
gactggcagaragtaatgtac

SEQ ID NO: 15075 - DNA, 21 bp, Homo sapiens
tccatttttayagtgcatgca

SEQ ID NO: 15076 - DNA, 21 bp, Homo sapiens
tactgatacartgcaatccct

SEQ ID NO: 15077 - DNA, 21 bp, Homo sapiens
atcaccctcgmatcagaattt

SEQ ID NO: 15078 - DNA, 21 bp, Homo sapiens
atcttatatgyggcggtattt

SEQ ID NO: 15079 - DNA, 21 bp, Homo sapiens
ccagacactcmcagccatctg

SEQ ID NO: 15080 - DNA, 21 bp, Homo sapiens
gcttgataaakgcatgaggag

SEQ ID NO: 15081 - DNA, 21 bp, Homo sapiens
tcaaatgctgycattgcagtt

SEQ ID NO: 15082 - DNA, 21 bp, Homo sapiens
gtggaaggccygatgtggtgg

SEQ ID NO: 15083 - DNA, 21 bp, Homo sapiens
ggatggcacartactctgtga

SEQ ID NO: 15084 - DNA, 21 bp, Homo sapiens
taacataggtrcattccaagg

SEQ ID NO: 15085 - DNA, 21 bp, Homo sapiens
aagagttttayagccactatt

SEQ ID NO: 15086 - DNA, 21 bp, Homo sapiens
gccctcaaagrgcaccattct

SEQ ID NO: 15087 - DNA, 21 bp, Homo sapiens
ctttgctattmtagataataa

SEQ ID NO: 15088 - DNA, 21 bp, Homo sapiens
acatcccccaycaatcatggc

SEQ ID NO: 15089 - DNA, 21 bp, Homo sapiens
ggggtgtaaaygccagccaat

SEQ ID NO: 15090 - DNA, 21 bp, Homo sapiens
taagagccagrttctgtttgt

SEQ ID NO: 15091 - DNA, 21 bp, Homo sapiens
ctggatacctygtctcttatc

SEQ ID NO: 15092 - DNA, 21 bp, Homo sapiens
tgcttagtgcrgagccattaa

SEQ ID NO: 15093 - DNA, 21 bp, Homo sapiens
ccccaatagckccctaaaacg

SEQ ID NO: 15094 - DNA, 21 bp, Homo sapiens
aacgtagcacyacataatggt

SEQ ID NO: 15095 - DNA, 21 bp, Homo sapiens
ttcctccccartcaactggtc

SEQ ID NO: 15096 - DNA, 21 bp, Homo sapiens
gtttctgtagragctgggctg

SEQ ID NO: 15097 - DNA, 21 bp, Homo sapiens
tttaggggttktttcctagga

SEQ ID NO: 15098 - DNA, 21 bp, Homo sapiens
aatcagagtcmattagagtta

SEQ ID NO: 15099 - DNA, 21 bp, Homo sapiens
caaggaagacracatgtgtgt

SEQ ID NO: 15100 - DNA, 21 bp, Homo sapiens
agttcctcgayaaggtcattg

SEQ ID NO: 15101 - DNA, 21 bp, Homo sapiens
gactgtttctrctccacagct

SEQ ID NO: 15102 - DNA, 21 bp, Homo sapiens
cgtgcaaaccrgaccacccta

SEQ ID NO: 15103 - DNA, 21 bp, Homo sapiens
acaaacactayccaacttcaa

SEQ ID NO: 15104 - DNA, 21 bp, Homo sapiens
cccaacctcarctccaaaaca

SEQ ID NO: 15105 - DNA, 21 bp, Homo sapiens
agaattccaartaagagtttt

SEQ ID NO: 15106 - DNA, 21 bp, Homo sapiens
ttcataacaayaggaaactac

SEQ ID NO: 15107 - DNA, 21 bp, Homo sapiens
atatgctgtgrgagcttaact

SEQ ID NO: 15108 - DNA, 21 bp, Homo sapiens
cactgtgtgarcatttctcac

SEQ ID NO: 15109 - DNA, 21 bp, Homo sapiens
tgccttgtggraaaaaaaaat

SEQ ID NO: 15110 - DNA, 21 bp, Homo sapiens
attatgcagcyattaaaaact

SEQ ID NO: 15111 - DNA, 21 bp, Homo sapiens
gattcacaaaytcgggaatga

SEQ ID NO: 15112 - DNA, 21 bp, Homo sapiens
catgagtccarctaaaaacct

SEQ ID NO: 15113 - DNA, 21 bp, Homo sapiens
tcaaggattgrcagttgaagc

SEQ ID NO: 15114 - DNA, 21 bp, Homo sapiens
cttgactaacmacaagtaagt

SEQ ID NO: 15115 - DNA, 21 bp, Homo sapiens
tgctatgctgmagccactttg

SEQ ID NO: 15116 - DNA, 21 bp, Homo sapiens
ctctaaaaaaraagaaagtaa

SEQ ID NO: 15117 - DNA, 21 bp, Homo sapiens
actaggcctcmcagtcgtact

SEQ ID NO: 15118 - DNA, 21 bp, Homo sapiens
ataataaagaygttggtaaga

SEQ ID NO: 15119 - DNA, 21 bp, Homo sapiens
cacattacaayacaaagaaat

SEQ ID NO: 15120 - DNA, 21 bp, Homo sapiens
caaatagcatygcattatcct

SEQ ID NO: 15121 - DNA, 21 bp, Homo sapiens
acctgtacatytgaagctcgt

SEQ ID NO: 15122 - DNA, 21 bp, Homo sapiens
aaggggcacgyattacacaag

SEQ ID NO: 15123 - DNA, 21 bp, Homo sapiens
cactctcatcrcatatattgg

SEQ ID NO: 15124 - DNA, 21 bp, Homo sapiens
atatgtgataygtaaacagga

SEQ ID NO: 15125 - DNA, 21 bp, Homo sapiens
gacttgttgtragtgttaaaa

SEQ ID NO: 15126 - DNA, 21 bp, Homo sapiens
tgagatgttgrgcactaaaat

SEQ ID NO: 15127 - DNA, 21 bp, Homo sapiens
gatcattaatraagatgaata

SEQ ID NO: 15128 - DNA, 21 bp, Homo sapiens
gatggctcctycattttcaat

SEQ ID NO: 15129 - DNA, 21 bp, Homo sapiens
agaggtaaaamttctttcaga

SEQ ID NO: 15130 - DNA, 21 bp, Homo sapiens
tgatttgtgargcattcatct

SEQ ID NO: 15131 - DNA, 21 bp, Homo sapiens
gcagaagcaartatcagcctt

SEQ ID NO: 15132 - DNA, 21 bp, Homo sapiens
tttttatatgyttgctccctt

SEQ ID NO: 15133 - DNA, 21 bp, Homo sapiens
taagcatgcakagcctaatat

SEQ ID NO: 15134 - DNA, 21 bp, Homo sapiens
ttctgtcttcrcatcaaaata

SEQ ID NO: 15135 - DNA, 21 bp, Homo sapiens
gagtcacagaytgcttagtct

SEQ ID NO: 15136 - DNA, 21 bp, Homo sapiens
catttaccgartatgtatttt

SEQ ID NO: 15137 - DNA, 21 bp, Homo sapiens
gtgcaactatrttgttctgtt

SEQ ID NO: 15138 - DNA, 21 bp, Homo sapiens
tcacatgagtyaagtttatac

SEQ ID NO: 15139 - DNA, 21 bp, Homo sapiens
cctaaagctakgtgaagaact

SEQ ID NO: 15140 - DNA, 21 bp, Homo sapiens
gaagaattttmgagactcttt

SEQ ID NO: 15141 - DNA, 21 bp, Homo sapiens
atcctttgttragacaaagca

SEQ ID NO: 15142 - DNA, 21 bp, Homo sapiens
aaggggcaggrcgacccactt

SEQ ID NO: 15143 - DNA, 21 bp, Homo sapiens
atcagctttayacaagagtta

SEQ ID NO: 15144 - DNA, 21 bp, Homo sapiens
ccaacagttgygcttttaaca

SEQ ID NO: 15145 - DNA, 21 bp, Homo sapiens
ccattcaaaayaatgcacgtg

SEQ ID NO: 15146 - DNA, 21 bp, Homo sapiens
aatatacagcrataggcaaca

SEQ ID NO: 15147 - DNA, 21 bp, Homo sapiens
agaagatctgyggcaggccca

SEQ ID NO: 15148 - DNA, 21 bp, Homo sapiens
aaatgctgatmaattcctgta

SEQ ID NO: 15149 - DNA, 21 bp, Homo sapiens
tcagtttgacrtaaaggtact

SEQ ID NO: 15150 - DNA, 21 bp, Homo sapiens
gatcttttggratgtgggtgt

SEQ ID NO: 15151 - DNA, 21 bp, Homo sapiens
aaaagccaaamtgacggtttg

SEQ ID NO: 15152 - DNA, 21 bp, Homo sapiens
aagtgattggraagaatttta

SEQ ID NO: 15153 - DNA, 21 bp, Homo sapiens
aaaaaaactcmgaatatcagg

SEQ ID NO: 15154 - DNA, 21 bp, Homo sapiens
tttttaataaygggcagcttt

SEQ ID NO: 15155 - DNA, 21 bp, Homo sapiens
aaaccactctrtggaaataac

SEQ ID NO: 15156 - DNA, 21 bp, Homo sapiens
gacttggaacyggaggctaca

SEQ ID NO: 15157 - DNA, 21 bp, Homo sapiens
gacacatatcytcttgagcac

SEQ ID NO: 15158 - DNA, 21 bp, Homo sapiens
gttgggaatgraatcttagga

SEQ ID NO: 15159 - DNA, 21 bp, Homo sapiens
ggctccagcartaagcctaat

SEQ ID NO: 15160 - DNA, 21 bp, Homo sapiens
acatatgcacrctcaccgaac

SEQ ID NO: 15161 - DNA, 21 bp, Homo sapiens
tccaaaacatyacctatgaat

SEQ ID NO: 15162 - DNA, 21 bp, Homo sapiens
gaaaagtgatkaagtgcacaa

SEQ ID NO: 15163 - DNA, 21 bp, Homo sapiens
acaagctcatyccaaaggcat

SEQ ID NO: 15164 - DNA, 21 bp, Homo sapiens
tggcaagctcyttcaagttct

SEQ ID NO: 15165 - DNA, 21 bp, Homo sapiens
agctgagctgrgtcttaatgg

SEQ ID NO: 15166 - DNA, 21 bp, Homo sapiens
tttcagtgcaycaattcctcc

SEQ ID NO: 15167 - DNA, 21 bp, Homo sapiens
ttttgttagcrtaggtttgtt

SEQ ID NO: 15168 - DNA, 21 bp, Homo sapiens
tttttataaayagaaagactt

SEQ ID NO: 15169 - DNA, 21 bp, Homo sapiens
agtgaaactaytgaatgcatg

SEQ ID NO: 15170 - DNA, 21 bp, Homo sapiens
actctgagcaygtcagagtca

SEQ ID NO: 15171 - DNA, 21 bp, Homo sapiens
tgaacatattygataagcaga

SEQ ID NO: 15172 - DNA, 21 bp, Homo sapiens
aaagcaaatcyatgaaacaac

SEQ ID NO: 15173 - DNA, 21 bp, Homo sapiens
tactgcatttyctaaacctat

SEQ ID NO: 15174 - DNA, 21 bp, Homo sapiens
tgcatgaacamtaagaacttg

SEQ ID NO: 15175 - DNA, 21 bp, Homo sapiens
cacgttccatkatattaagcc

SEQ ID NO: 15176 - DNA, 21 bp, Homo sapiens
gcccctccgtkgatggctttt

SEQ ID NO: 15177 - DNA, 21 bp, Homo sapiens
tggtgcctctrtttatagaac

SEQ ID NO: 15178 - DNA, 21 bp, Homo sapiens
atagtggataygtgggaaaat

SEQ ID NO: 15179 - DNA, 21 bp, Homo sapiens
ctcccgccttytggattctac

SEQ ID NO: 15180 - DNA, 21 bp, Homo sapiens
ggagattgatrgattataaat

SEQ ID NO: 15181 - DNA, 21 bp, Homo sapiens
cccattgatgytatcttgtca

SEQ ID NO: 15182 - DNA, 21 bp, Homo sapiens
aggtcagtccygaggcaggca

SEQ ID NO: 15183 - DNA, 21 bp, Homo sapiens
tggggcagatmtaaaatattc

SEQ ID NO: 15184 - DNA, 21 bp, Homo sapiens
tccactgatgycccttctcgc

SEQ ID NO: 15185 - DNA, 21 bp, Homo sapiens
acttgggaaaygaaagacata

SEQ ID NO: 15186 - DNA, 21 bp, Homo sapiens
cccaacatgcytttattcact

SEQ ID NO: 15187 - DNA, 21 bp, Homo sapiens
aaatgaattcrggcactatag

SEQ ID NO: 15188 - DNA, 21 bp, Homo sapiens
tccttccaaaktaaacaaaca

SEQ ID NO: 15189 - DNA, 21 bp, Homo sapiens
ggtgctcaatrtatatcaatg

SEQ ID NO: 15190 - DNA, 21 bp, Homo sapiens
aatagctcaartctcagagga

SEQ ID NO: 15191 - DNA, 21 bp, Homo sapiens
aattgtctacmcagtacatca

SEQ ID NO: 15192 - DNA, 21 bp, Homo sapiens
agattacattycccatttcat

SEQ ID NO: 15193 - DNA, 21 bp, Homo sapiens
tcttctttgcytgaaaccatc

SEQ ID NO: 15194 - DNA, 21 bp, Homo sapiens
atgatacctgyttgctccatc

SEQ ID NO: 15195 - DNA, 21 bp, Homo sapiens
actagtccttkctcttccatc

SEQ ID NO: 15196 - DNA, 21 bp, Homo sapiens
agactctcttktacatacctt

SEQ ID NO: 15197 - DNA, 21 bp, Homo sapiens
ttgggaataartcttatcact

SEQ ID NO: 15198 - DNA, 21 bp, Homo sapiens
gaatctgtgayggatagcggt

SEQ ID NO: 15199 - DNA, 21 bp, Homo sapiens
cttaaaaaacygtgtgttttc

SEQ ID NO: 15200 - DNA, 21 bp, Homo sapiens
gttcttgctgytagatataca

SEQ ID NO: 15201 - DNA, 21 bp, Homo sapiens
atctactggcrtatcctagaa

SEQ ID NO: 15202 - DNA, 21 bp, Homo sapiens
acatcttaccyatctccttac

SEQ ID NO: 15203 - DNA, 21 bp, Homo sapiens
aaacaggggaragaaggaagg

SEQ ID NO: 15204 - DNA, 21 bp, Homo sapiens
gcgaccagcaraaactaagac

SEQ ID NO: 15205 - DNA, 21 bp, Homo sapiens
gctagcaggaytactgccccg

SEQ ID NO: 15206 - DNA, 21 bp, Homo sapiens
atgtactcccrtaactttttg

SEQ ID NO: 15207 - DNA, 21 bp, Homo sapiens
tataactgtgyataaaaaagt

SEQ ID NO: 15208 - DNA, 21 bp, Homo sapiens
ataaatatgcyacaaatgttg

SEQ ID NO: 15209 - DNA, 21 bp, Homo sapiens
ccaaggctggraacagaatga

SEQ ID NO: 15210 - DNA, 21 bp, Homo sapiens
ttttagagggyttgtgatttt

SEQ ID NO: 15211 - DNA, 21 bp, Homo sapiens
taacttgagaragaaaagaaa

SEQ ID NO: 15212 - DNA, 21 bp, Homo sapiens
gctaacatggmccctctcact

SEQ ID NO: 15213 - DNA, 21 bp, Homo sapiens
aatgacttctrggatttttaa

SEQ ID NO: 15214 - DNA, 21 bp, Homo sapiens
gctaggacagyagcaaagaag

SEQ ID NO: 15215 - DNA, 21 bp, Homo sapiens
gggcctcaggkttattcagta

SEQ ID NO: 15216 - DNA, 21 bp, Homo sapiens
ccagttgccamaatctttcaa

SEQ ID NO: 15217 - DNA, 21 bp, Homo sapiens
aggtctggatycattcatggg

SEQ ID NO: 15218 - DNA, 21 bp, Homo sapiens
gatttttaacrgaaggattaa

SEQ ID NO: 15219 - DNA, 21 bp, Homo sapiens
attctgttagmagatagaata

SEQ ID NO: 15220 - DNA, 21 bp, Homo sapiens
atgtggtttgyagaacagctg

SEQ ID NO: 15221 - DNA, 21 bp, Homo sapiens
ctgctgaagaygagctctcaa

SEQ ID NO: 15222 - DNA, 21 bp, Homo sapiens
atttttcattmtaatactggt

SEQ ID NO: 15223 - DNA, 21 bp, Homo sapiens
caatccatttyatgagactag

SEQ ID NO: 15224 - DNA, 21 bp, Homo sapiens
gacaggaagtrgaaaagtcct

SEQ ID NO: 15225 - DNA, 21 bp, Homo sapiens
ttttttttaargtttctacca

SEQ ID NO: 15226 - DNA, 21 bp, Homo sapiens
acttgagaagkggccacacct

SEQ ID NO: 15227 - DNA, 21 bp, Homo sapiens
aggaatgtaakatgcagttga

SEQ ID NO: 15228 - DNA, 21 bp, Homo sapiens
ggagatgcacrctgctgccaa

SEQ ID NO: 15229 - DNA, 21 bp, Homo sapiens
aaggagcatcragcatcccct

SEQ ID NO: 15230 - DNA, 21 bp, Homo sapiens
gcaaacaaatrtctggtccca

SEQ ID NO: 15231 - DNA, 21 bp, Homo sapiens
tagacattagrcaatgaaaca

SEQ ID NO: 15232 - DNA, 21 bp, Homo sapiens
ggatcagcccytcccaggtga

SEQ ID NO: 15233 - DNA, 21 bp, Homo sapiens
gatgactttgyggaatgtcag

SEQ ID NO: 15234 - DNA, 21 bp, Homo sapiens
atcgctggcarcctttatagt

SEQ ID NO: 15235 - DNA, 21 bp, Homo sapiens
agtagagaggyaaggaggaga

SEQ ID NO: 15236 - DNA, 21 bp, Homo sapiens
gggtgttgttyaaatcagtaa

SEQ ID NO: 15237 - DNA, 21 bp, Homo sapiens
catctttcttrtgggcctttg

SEQ ID NO: 15238 - DNA, 21 bp, Homo sapiens
aaacttatggygattactcaa

SEQ ID NO: 15239 - DNA, 21 bp, Homo sapiens
agacctggtgytctttctctt

SEQ ID NO: 15240 - DNA, 21 bp, Homo sapiens
aacccaactcygttttcagct

SEQ ID NO: 15241 - DNA, 21 bp, Homo sapiens
caatctctatyagaatttgga

SEQ ID NO: 15242 - DNA, 21 bp, Homo sapiens
ggcagatggcrggtgtcaggt

SEQ ID NO: 15243 - DNA, 21 bp, Homo sapiens
tggaatatacrgataccttga

SEQ ID NO: 15244 - DNA, 21 bp, Homo sapiens
ggtttaaaatktcaccactca

SEQ ID NO: 15245 - DNA, 21 bp, Homo sapiens
gagtttgggaygctataaaca

SEQ ID NO: 15246 - DNA, 21 bp, Homo sapiens
gagttctactrttaaactaaa

SEQ ID NO: 15247 - DNA, 21 bp, Homo sapiens
gattagaattrtgatccctga

SEQ ID NO: 15248 - DNA, 21 bp, Homo sapiens
ccacttcctcrttaatcctca

SEQ ID NO: 15249 - DNA, 21 bp, Homo sapiens
aaagtgtcagyataaggagca

SEQ ID NO: 15250 - DNA, 21 bp, Homo sapiens
tttgtggactyactcttacaa

SEQ ID NO: 15251 - DNA, 21 bp, Homo sapiens
gcagttattcygactgagtat

SEQ ID NO: 15252 - DNA, 21 bp, Homo sapiens
gactttgacartatgggacaa

SEQ ID NO: 15253 - DNA, 21 bp, Homo sapiens
agcacacgggrtatcccttcc

SEQ ID NO: 15254 - DNA, 21 bp, Homo sapiens
ctacatgttaygcttttagat

SEQ ID NO: 15255 - DNA, 21 bp, Homo sapiens
gaagctactgyaggccaattt

SEQ ID NO: 15256 - DNA, 21 bp, Homo sapiens
gattttaggcrttacaagccg

SEQ ID NO: 15257 - DNA, 21 bp, Homo sapiens
caactaggaarccccaggcgc

SEQ ID NO: 15258 - DNA, 21 bp, Homo sapiens
aaacctgaccrgagagatgag

SEQ ID NO: 15259 - DNA, 21 bp, Homo sapiens
tgactcctgcytacctcgccc

SEQ ID NO: 15260 - DNA, 21 bp, Homo sapiens
taaaaatgaayccatctttgg

SEQ ID NO: 15261 - DNA, 21 bp, Homo sapiens
ctttgccctcyattcccagaa

SEQ ID NO: 15262 - DNA, 21 bp, Homo sapiens
gcctatctggyggggatcatg

SEQ ID NO: 15263 - DNA, 21 bp, Homo sapiens
ctctcccaccrtaccatccct

SEQ ID NO: 15264 - DNA, 21 bp, Homo sapiens
ggaagagaaarttgaactaga

SEQ ID NO: 15265 - DNA, 21 bp, Homo sapiens
ggagtgggcamgtgagaaaga

SEQ ID NO: 15266 - DNA, 21 bp, Homo sapiens
catgggcagtygggccagaga

SEQ ID NO: 15267 - DNA, 21 bp, Homo sapiens
gaacaaaatamatccaaataa

SEQ ID NO: 15268 - DNA, 21 bp, Homo sapiens
ttttgattggycgctcccgtg

SEQ ID NO: 15269 - DNA, 21 bp, Homo sapiens
ctaccaaaaartatcttgcat

SEQ ID NO: 15270 - DNA, 21 bp, Homo sapiens
tcacatcatgycactaaaata

SEQ ID NO: 15271 - DNA, 21 bp, Homo sapiens
ttatttcaggyttcatttggt

SEQ ID NO: 15272 - DNA, 21 bp, Homo sapiens
cttcctcaacrtggtaacttt

SEQ ID NO: 15273 - DNA, 21 bp, Homo sapiens
gctggtcatgytctggggagg

SEQ ID NO: 15274 - DNA, 21 bp, Homo sapiens
ggggcatcccrctgggtcaca

SEQ ID NO: 15275 - DNA, 21 bp, Homo sapiens
ttacggttatytcatcatttt

SEQ ID NO: 15276 - DNA, 21 bp, Homo sapiens
ccaacagttgygtttggcgta

SEQ ID NO: 15277 - DNA, 21 bp, Homo sapiens
tgacaacataratcttcctga

SEQ ID NO: 15278 - DNA, 21 bp, Homo sapiens
gacttattccrgatgagatca

SEQ ID NO: 15279 - DNA, 21 bp, Homo sapiens
aattaaaatcrtgtaagaatt

SEQ ID NO: 15280 - DNA, 21 bp, Homo sapiens
tctctttcagyaacagtataa

SEQ ID NO: 15281 - DNA, 21 bp, Homo sapiens
gtgattagctrgttctctcca

SEQ ID NO: 15282 - DNA, 21 bp, Homo sapiens
ggagaccaacyctcacaggtc

SEQ ID NO: 15283 - DNA, 21 bp, Homo sapiens
tcttggccatrattcaacaga

SEQ ID NO: 15284 - DNA, 21 bp, Homo sapiens
agctaggatartctaccttgt

SEQ ID NO: 15285 - DNA, 21 bp, Homo sapiens
tgaggttctgyctttttattt

SEQ ID NO: 15286 - DNA, 21 bp, Homo sapiens
caattcactcmggcagaatta

SEQ ID NO: 15287 - DNA, 21 bp, Homo sapiens
ttaagcttggycttgcttccc

SEQ ID NO: 15288 - DNA, 21 bp, Homo sapiens
ggccacagagkagacaaatgt

SEQ ID NO: 15289 - DNA, 21 bp, Homo sapiens
gtttttttctyttgattcttg

SEQ ID NO: 15290 - DNA, 21 bp, Homo sapiens
acccagaccaygtacctttca

SEQ ID NO: 15291 - DNA, 21 bp, Homo sapiens
tcatcaaagtrttatttacct

SEQ ID NO: 15292 - DNA, 21 bp, Homo sapiens
acctaactacrgtttacttct

SEQ ID NO: 15293 - DNA, 21 bp, Homo sapiens
gaactttggaygaatgtttat

SEQ ID NO: 15294 - DNA, 21 bp, Homo sapiens
gcttctatcayagaaatgttt

SEQ ID NO: 15295 - DNA, 21 bp, Homo sapiens
ctgatgtgaaraagatctcat

SEQ ID NO: 15296 - DNA, 21 bp, Homo sapiens
gggaatggatkagatgtatct

SEQ ID NO: 15297 - DNA, 21 bp, Homo sapiens
ctatttcctaygagtttgtct

SEQ ID NO: 15298 - DNA, 21 bp, Homo sapiens
gaagaggagaygaagggagag

SEQ ID NO: 15299 - DNA, 21 bp, Homo sapiens
aacttctaaamatataccaag

SEQ ID NO: 15300 - DNA, 21 bp, Homo sapiens
tatatgtgttmcacttttgta

SEQ ID NO: 15301 - DNA, 21 bp, Homo sapiens
tgggagcatcrctttgatctg

SEQ ID NO: 15302 - DNA, 21 bp, Homo sapiens
tacttggcacrtagcaagtga

SEQ ID NO: 15303 - DNA, 21 bp, Homo sapiens
tcataagagcycctgtgatcc

SEQ ID NO: 15304 - DNA, 21 bp, Homo sapiens
tgtttctatcyactggaatat

SEQ ID NO: 15305 - DNA, 21 bp, Homo sapiens
gtatgtcctcrtgatcacaga

SEQ ID NO: 15306 - DNA, 21 bp, Homo sapiens
gcatacacagraaaccaatct

SEQ ID NO: 15307 - DNA, 21 bp, Homo sapiens
aaacataatgmaaagagaaat

SEQ ID NO: 15308 - DNA, 21 bp, Homo sapiens
aataccagtcygtaagtggat

SEQ ID NO: 15309 - DNA, 21 bp, Homo sapiens
cctttcatttyttccccctct

SEQ ID NO: 15310 - DNA, 21 bp, Homo sapiens
atgagcagtgrgtgcatctag

SEQ ID NO: 15311 - DNA, 21 bp, Homo sapiens
cttaagagagragaaactctt

SEQ ID NO: 15312 - DNA, 21 bp, Homo sapiens
ttccaatctgygtatgtagat

SEQ ID NO: 15313 - DNA, 21 bp, Homo sapiens
tttttaagtaygattctcttg

SEQ ID NO: 15314 - DNA, 21 bp, Homo sapiens
ccaatcatgcygctaaaaact

SEQ ID NO: 15315 - DNA, 21 bp, Homo sapiens
agcaatggaargtaataaagc

SEQ ID NO: 15316 - DNA, 21 bp, Homo sapiens
aggctgatgtkagaactttgt

SEQ ID NO: 15317 - DNA, 21 bp, Homo sapiens
aggaattgccrtatgagattg

SEQ ID NO: 15318 - DNA, 21 bp, Homo sapiens
gagaaatatarttagattcat

SEQ ID NO: 15319 - DNA, 21 bp, Homo sapiens
gaagagcatamcatagaataa

SEQ ID NO: 15320 - DNA, 21 bp, Homo sapiens
gaggtagagcrtttcaggaag

SEQ ID NO: 15321 - DNA, 21 bp, Homo sapiens
tttcctttctytcaagtaaga

SEQ ID NO: 15322 - DNA, 21 bp, Homo sapiens
actaaaacgcktgccaaatcc

SEQ ID NO: 15323 - DNA, 21 bp, Homo sapiens
caggagaaatkgtaggttgat

SEQ ID NO: 15324 - DNA, 21 bp, Homo sapiens
aggaaattaaracacagagag

SEQ ID NO: 15325 - DNA, 21 bp, Homo sapiens
atttgacataygttaactgtg

SEQ ID NO: 15326 - DNA, 21 bp, Homo sapiens
tgcacatatgyagggcagaaa

SEQ ID NO: 15327 - DNA, 21 bp, Homo sapiens
ttgtgggctcyagatgcattt

SEQ ID NO: 15328 - DNA, 21 bp, Homo sapiens
tatgaggagtygtgaactgac

SEQ ID NO: 15329 - DNA, 21 bp, Homo sapiens
tcacttttcaygatttaatgc

SEQ ID NO: 15330 - DNA, 21 bp, Homo sapiens
aattacctagyacctagtgaa

SEQ ID NO: 15331 - DNA, 21 bp, Homo sapiens
ttacatcaacyctgcaaagta

SEQ ID NO: 15332 - DNA, 21 bp, Homo sapiens
cattcatgatkatgctctcct

SEQ ID NO: 15333 - DNA, 21 bp, Homo sapiens
acaaccatgakaggtaggttc

SEQ ID NO: 15334 - DNA, 21 bp, Homo sapiens
gggaccaaagycattccttta

SEQ ID NO: 15335 - DNA, 21 bp, Homo sapiens
tggtttgtttmttggttcatt

SEQ ID NO: 15336 - DNA, 21 bp, Homo sapiens
ggactccagckgatgtcttca

SEQ ID NO: 15337 - DNA, 21 bp, Homo sapiens
aaatctcaatrgcttatgagc

SEQ ID NO: 15338 - DNA, 21 bp, Homo sapiens
aggaaaatggytctagccagg

SEQ ID NO: 15339 - DNA, 21 bp, Homo sapiens
tattggaagargatggttcct

SEQ ID NO: 15340 - DNA, 21 bp, Homo sapiens
tacaaaaacargacatataaa

SEQ ID NO: 15341 - DNA, 21 bp, Homo sapiens
acctgttttgrataaaatatt

SEQ ID NO: 15342 - DNA, 21 bp, Homo sapiens
aggtctttctracatgtggtg

SEQ ID NO: 15343 - DNA, 21 bp, Homo sapiens
ttgacagcttrcccagatgtg

SEQ ID NO: 15344 - DNA, 21 bp, Homo sapiens
ttcttgggatmgttcattctg

SEQ ID NO: 15345 - DNA, 21 bp, Homo sapiens
gctctgcaacyttggtctttt

SEQ ID NO: 15346 - DNA, 21 bp, Homo sapiens
atgcacaccaytacctagaat

SEQ ID NO: 15347 - DNA, 21 bp, Homo sapiens
accctcactcrtgatgctgaa

SEQ ID NO: 15348 - DNA, 21 bp, Homo sapiens
cactgcagggytacagggatg

SEQ ID NO: 15349 - DNA, 21 bp, Homo sapiens
atcacccagargtgtctctag

SEQ ID NO: 15350 - DNA, 21 bp, Homo sapiens
acaggctcttrggcttatcta

SEQ ID NO: 15351 - DNA, 21 bp, Homo sapiens
cagaatgtagrtacatatagg

SEQ ID NO: 15352 - DNA, 21 bp, Homo sapiens
tgttatggcakccctatcata

SEQ ID NO: 15353 - DNA, 21 bp, Homo sapiens
gctgatcttgrgtctcctaat

SEQ ID NO: 15354 - DNA, 21 bp, Homo sapiens
ctctgtggcayaaattacaca

SEQ ID NO: 15355 - DNA, 21 bp, Homo sapiens
agatgccctcrgtggcccaga

SEQ ID NO: 15356 - DNA, 21 bp, Homo sapiens
tatgttcctcytcctctacag

SEQ ID NO: 15357 - DNA, 21 bp, Homo sapiens
tctagtgctgyggcatgtggt

SEQ ID NO: 15358 - DNA, 21 bp, Homo sapiens
ttcctctcgckgggtcgtggg

SEQ ID NO: 15359 - DNA, 21 bp, Homo sapiens
gaagttttagrgagatgaagt

SEQ ID NO: 15360 - DNA, 21 bp, Homo sapiens
tgcccgttgaygccctcccca

SEQ ID NO: 15361 - DNA, 21 bp, Homo sapiens
atgcttttacyggactctgca

SEQ ID NO: 15362 - DNA, 21 bp, Homo sapiens
ccagaggtagrtgagagccag

SEQ ID NO: 15363 - DNA, 21 bp, Homo sapiens
tccaaaccacrgaacaacttg

SEQ ID NO: 15364 - DNA, 21 bp, Homo sapiens
gcccttagccmcgtggggctg

SEQ ID NO: 15365 - DNA, 21 bp, Homo sapiens
gcatccaggcrtgtggcttac

SEQ ID NO: 15366 - DNA, 21 bp, Homo sapiens
acagattgggyttttctgttc

SEQ ID NO: 15367 - DNA, 21 bp, Homo sapiens
ccatatcatakatcaggtctg

SEQ ID NO: 15368 - DNA, 21 bp, Homo sapiens
cttcgtaccayttagcaaata

SEQ ID NO: 15369 - DNA, 21 bp, Homo sapiens
aagaaatgcarataacaaaga

SEQ ID NO: 15370 - DNA, 21 bp, Homo sapiens
gaaatacatartttaaaatgt

SEQ ID NO: 15371 - DNA, 21 bp, Homo sapiens
gaagaaaatgracagggcttt

SEQ ID NO: 15372 - DNA, 21 bp, Homo sapiens
gggaagttccrcattatctca

SEQ ID NO: 15373 - DNA, 21 bp, Homo sapiens
gacttccagtktgagaacgtt

SEQ ID NO: 15374 - DNA, 21 bp, Homo sapiens
gatgcagtgarctccaagccc

SEQ ID NO: 15375 - DNA, 21 bp, Homo sapiens
tcctatgcacmtataaacagg

SEQ ID NO: 15376 - DNA, 21 bp, Homo sapiens
cagttatctgyatcaacctcg

SEQ ID NO: 15377 - DNA, 21 bp, Homo sapiens
ggctgtgcccrctgcttctgg

SEQ ID NO: 15378 - DNA, 21 bp, Homo sapiens
ggtttaattcraagaaaataa

SEQ ID NO: 15379 - DNA, 21 bp, Homo sapiens
acaaggcacaraacctgtgct

SEQ ID NO: 15380 - DNA, 21 bp, Homo sapiens
acgctgaggcytcctaaagcc

SEQ ID NO: 15381 - DNA, 21 bp, Homo sapiens
ataatcgtttyctcccttttt

SEQ ID NO: 15382 - DNA, 21 bp, Homo sapiens
tcagctagttrgatctgtcca

SEQ ID NO: 15383 - DNA, 21 bp, Homo sapiens
tggaatttgtktctgactctt

SEQ ID NO: 15384 - DNA, 21 bp, Homo sapiens
gaagtgaaacraatccagacc

SEQ ID NO: 15385 - DNA, 21 bp, Homo sapiens
aaatggcagayccaagtgttg

SEQ ID NO: 15386 - DNA, 21 bp, Homo sapiens
tctaagtagcygctgacaaag

SEQ ID NO: 15387 - DNA, 21 bp, Homo sapiens
gaggatgttgkacacccagta

SEQ ID NO: 15388 - DNA, 21 bp, Homo sapiens
ggatctcacaygtggtcaaca

SEQ ID NO: 15389 - DNA, 21 bp, Homo sapiens
tattttaaggygcaaacaatt

SEQ ID NO: 15390 - DNA, 21 bp, Homo sapiens
tgctccaacayctgcaggcta

SEQ ID NO: 15391 - DNA, 21 bp, Homo sapiens
agattcatttmttggcttatc

SEQ ID NO: 15392 - DNA, 21 bp, Homo sapiens
ctgtacgttcytcatgccacc

SEQ ID NO: 15393 - DNA, 21 bp, Homo sapiens
gatggaggccrttcacagtgc

SEQ ID NO: 15394 - DNA, 21 bp, Homo sapiens
actggtgctaygaggaaaccc

SEQ ID NO: 15395 - DNA, 21 bp, Homo sapiens
caggttaagayattgattagg

SEQ ID NO: 15396 - DNA, 21 bp, Homo sapiens
agtgatagttkcagagaaggg

SEQ ID NO: 15397 - DNA, 21 bp, Homo sapiens
cccgattcttkaccttctaag

SEQ ID NO: 15398 - DNA, 21 bp, Homo sapiens
cctaagcactygtccacaaat

SEQ ID NO: 15399 - DNA, 21 bp, Homo sapiens
gcattgtcctratgttattat

SEQ ID NO: 15400 - DNA, 21 bp, Homo sapiens
cagaattttcrgatttatttt

SEQ ID NO: 15401 - DNA, 21 bp, Homo sapiens
gacccttgacrcacaaaggaa

SEQ ID NO: 15402 - DNA, 21 bp, Homo sapiens
cttttgggtcrgaaagaccta

SEQ ID NO: 15403 - DNA, 21 bp, Homo sapiens
accatttgatragttttaacc

SEQ ID NO: 15404 - DNA, 21 bp, Homo sapiens
aaccagcctgrcaagtgttag

SEQ ID NO: 15405 - DNA, 21 bp, Homo sapiens
ggtgaaggagyagatgcctca

SEQ ID NO: 15406 - DNA, 21 bp, Homo sapiens
gcccaaggtcrtaggatgggt

SEQ ID NO: 15407 - DNA, 21 bp, Homo sapiens
tttctaggatyaagcaaattt

SEQ ID NO: 15408 - DNA, 21 bp, Homo sapiens
tccctgatccygtcttctatc

SEQ ID NO: 15409 - DNA, 21 bp, Homo sapiens
ggggtttgaaycatgggcagg

SEQ ID NO: 15410 - DNA, 21 bp, Homo sapiens
gattggggatyaaaggactca

SEQ ID NO: 15411 - DNA, 21 bp, Homo sapiens
tcttcatatgktcttccctct

SEQ ID NO: 15412 - DNA, 21 bp, Homo sapiens
caattaggccygtagtgtaga

SEQ ID NO: 15413 - DNA, 21 bp, Homo sapiens
acccgctaccrtgtgatggtg

SEQ ID NO: 15414 - DNA, 21 bp, Homo sapiens
attcttctgcrgcagtcattt

SEQ ID NO: 15415 - DNA, 21 bp, Homo sapiens
cccaagctgakgcttacatca

SEQ ID NO: 15416 - DNA, 21 bp, Homo sapiens
ctgtgaatacrtgcaggcaga

SEQ ID NO: 15417 - DNA, 21 bp, Homo sapiens
tatttacatcmtagccttgtc

SEQ ID NO: 15418 - DNA, 21 bp, Homo sapiens
gcaatatgttrcacaatgtgt

SEQ ID NO: 15419 - DNA, 21 bp, Homo sapiens
ttctttacacrgagttttaga

SEQ ID NO: 15420 - DNA, 21 bp, Homo sapiens
ccaccaccctkcgactcatac

SEQ ID NO: 15421 - DNA, 21 bp, Homo sapiens
actgaataaayccattactct

SEQ ID NO: 15422 - DNA, 21 bp, Homo sapiens
atgaatgagaygggagttcaa

SEQ ID NO: 15423 - DNA, 21 bp, Homo sapiens
ggatttgagaygacggggagt

SEQ ID NO: 15424 - DNA, 21 bp, Homo sapiens
tctccttctgmagcactctat

SEQ ID NO: 15425 - DNA, 21 bp, Homo sapiens
tgaccgtgtckgcatggagca

SEQ ID NO: 15426 - DNA, 21 bp, Homo sapiens
agcttttatayaaaatattaa

SEQ ID NO: 15427 - DNA, 21 bp, Homo sapiens
tgtaggttatyacctggactg

SEQ ID NO: 15428 - DNA, 21 bp, Homo sapiens
gggcgtgaaayacaaagggta

SEQ ID NO: 15429 - DNA, 21 bp, Homo sapiens
tacaagaagaracatgaaaga

SEQ ID NO: 15430 - DNA, 21 bp, Homo sapiens
cccaggcaacrcattaattgc

SEQ ID NO: 15431 - DNA, 21 bp, Homo sapiens
cttgcacccaygcatgtctat

SEQ ID NO: 15432 - DNA, 21 bp, Homo sapiens
cctggaaatgrcatcctgaga

SEQ ID NO: 15433 - DNA, 21 bp, Homo sapiens
gcagcattgayattgcccttg

SEQ ID NO: 15434 - DNA, 21 bp, Homo sapiens
tggaaaatacmcctgagcatt

SEQ ID NO: 15435 - DNA, 21 bp, Homo sapiens
gtgttcccagrgacctcctcc

SEQ ID NO: 15436 - DNA, 21 bp, Homo sapiens
attcaatagayaactgaagca

SEQ ID NO: 15437 - DNA, 21 bp, Homo sapiens
gaggagcacamttgttggatt

SEQ ID NO: 15438 - DNA, 21 bp, Homo sapiens
cagtttctcamcttcgtgtca

SEQ ID NO: 15439 - DNA, 21 bp, Homo sapiens
ttctcaccttygtgtcattat

SEQ ID NO: 15440 - DNA, 21 bp, Homo sapiens
gttacttcacmcatccttgta

SEQ ID NO: 15441 - DNA, 21 bp, Homo sapiens
ggctaacaaayatcagaaata

SEQ ID NO: 15442 - DNA, 21 bp, Homo sapiens
tccgaagaaarcacaaagcca

SEQ ID NO: 15443 - DNA, 21 bp, Homo sapiens
gcagtgccgamtgtccctgag

SEQ ID NO: 15444 - DNA, 21 bp, Homo sapiens
gggccaccctygcttcactga

SEQ ID NO: 15445 - DNA, 21 bp, Homo sapiens
cggaaacctcrctgtctgccc

SEQ ID NO: 15446 - DNA, 21 bp, Homo sapiens
ccaccgggccrccagaaagtc

SEQ ID NO: 15447 - DNA, 21 bp, Homo sapiens
gaaaataaacrttctgacaaa

SEQ ID NO: 15448 - DNA, 21 bp, Homo sapiens
gccaagaactktatgagcacg

SEQ ID NO: 15449 - DNA, 21 bp, Homo sapiens
caggaatgatrccggggcagc

SEQ ID NO: 15450 - DNA, 21 bp, Homo sapiens
ttgttagaagratgggagctg

SEQ ID NO: 15451 - DNA, 21 bp, Homo sapiens
gacccagccaygctcacccag

SEQ ID NO: 15452 - DNA, 21 bp, Homo sapiens
ctggtttatartaacattgta

SEQ ID NO: 15453 - DNA, 21 bp, Homo sapiens
ccaaagaaagkcaagacttgt

SEQ ID NO: 15454 - DNA, 21 bp, Homo sapiens
gctcaaaggcygtgccggggc

SEQ ID NO: 15455 - DNA, 21 bp, Homo sapiens
ctttcttgagrgcctggtaga

SEQ ID NO: 15456 - DNA, 21 bp, Homo sapiens
tgtacacctgygtggtctcca

SEQ ID NO: 15457 - DNA, 21 bp, Homo sapiens
ggttgccgtcrgcgatgtcat

SEQ ID NO: 15458 - DNA, 21 bp, Homo sapiens
ttggccttaayccctgcgtcc

SEQ ID NO: 15459 - DNA, 21 bp, Homo sapiens
ggctccaggaygtcgtagtgg

SEQ ID NO: 15460 - DNA, 21 bp, Homo sapiens
cctccagcatytctcgctagg

SEQ ID NO: 15461 - DNA, 21 bp, Homo sapiens
cagcagaaagraaccaacaac

SEQ ID NO: 15462 - DNA, 21 bp, Homo sapiens
gggtttctgtrggggaggccc

SEQ ID NO: 15463 - DNA, 21 bp, Homo sapiens
aaatattttamaataaaaata

SEQ ID NO: 15464 - DNA, 21 bp, Homo sapiens
atactattgayataaaaatgg

SEQ ID NO: 15465 - DNA, 21 bp, Homo sapiens
acattcttacyaggccagatg

SEQ ID NO: 15466 - DNA, 21 bp, Homo sapiens
tattagaaaaygttattaagg

SEQ ID NO: 15467 - DNA, 21 bp, Homo sapiens
cccaacattcrttgattaagc

SEQ ID NO: 15468 - DNA, 21 bp, Homo sapiens
gggaaagagaygtcagagccc

SEQ ID NO: 15469 - DNA, 21 bp, Homo sapiens
ttttatctgtygaagtgctca

SEQ ID NO: 15470 - DNA, 21 bp, Homo sapiens
caccactgacyagctggtgag

SEQ ID NO: 15471 - DNA, 21 bp, Homo sapiens
gtccttcagaygcacgaggca

SEQ ID NO: 15472 - DNA, 21 bp, Homo sapiens
taggaagcagytgaaggccag

SEQ ID NO: 15473 - DNA, 21 bp, Homo sapiens
attcctgatgmaacatgagcc

SEQ ID NO: 15474 - DNA, 21 bp, Homo sapiens
gggaaataggyccattgcatg

SEQ ID NO: 15475 - DNA, 21 bp, Homo sapiens
ccatcttctgygttgccagag

SEQ ID NO: 15476 - DNA, 21 bp, Homo sapiens
ctcagaactgyctgtggtcct

SEQ ID NO: 15477 - DNA, 21 bp, Homo sapiens
agaatcaggaytggcattgcc

SEQ ID NO: 15478 - DNA, 21 bp, Homo sapiens
aggtcaccaakctccatgttg

SEQ ID NO: 15479 - DNA, 21 bp, Homo sapiens
tgcctaattgrggaataaatt

SEQ ID NO: 15480 - DNA, 21 bp, Homo sapiens
actgaggaccrgtaaatctaa

SEQ ID NO: 15481 - DNA, 21 bp, Homo sapiens
ttttacctctyatctatctga

SEQ ID NO: 15482 - DNA, 21 bp, Homo sapiens
gaaattaataytgcctgttgt

SEQ ID NO: 15483 - DNA, 21 bp, Homo sapiens
gtgttttcctrtaggtgatag

SEQ ID NO: 15484 - DNA, 21 bp, Homo sapiens
tctaatatccrtcttaccaaa

SEQ ID NO: 15485 - DNA, 21 bp, Homo sapiens
tgtgccaggcytctgtcatag

SEQ ID NO: 15486 - DNA, 21 bp, Homo sapiens
tcctcactgcractgtcattt

SEQ ID NO: 15487 - DNA, 21 bp, Homo sapiens
ggaaagcgaarggaagtctta

SEQ ID NO: 15488 - DNA, 21 bp, Homo sapiens
gcactcgtatrcatgtcagct

SEQ ID NO: 15489 - DNA, 21 bp, Homo sapiens
aggcagtaagygcctctaatg

SEQ ID NO: 15490 - DNA, 21 bp, Homo sapiens
tttattcatcyatgtgttaac

SEQ ID NO: 15491 - DNA, 21 bp, Homo sapiens
tccctggctcyttgttctcac

SEQ ID NO: 15492 - DNA, 21 bp, Homo sapiens
attgcaaaacygattcccata

SEQ ID NO: 15493 - DNA, 21 bp, Homo sapiens
tccatgtgtakcccaaagaat

SEQ ID NO: 15494 - DNA, 21 bp, Homo sapiens
gatgccaatayacctttttgt

SEQ ID NO: 15495 - DNA, 21 bp, Homo sapiens
gtcttccttaygtgtccgaaa

SEQ ID NO: 15496 - DNA, 21 bp, Homo sapiens
actgcttttcrctgtcttctc

SEQ ID NO: 15497 - DNA, 21 bp, Homo sapiens
acagaatggaraaactatgaa

SEQ ID NO: 15498 - DNA, 21 bp, Homo sapiens
tatcacacaarcacacaatgc

SEQ ID NO: 15499 - DNA, 21 bp, Homo sapiens
gactgctggarattgctatag

SEQ ID NO: 15500 - DNA, 21 bp, Homo sapiens
gatcaacagartaagttctca

SEQ ID NO: 15501 - DNA, 21 bp, Homo sapiens
ctaccctgaamctctcagtgg

SEQ ID NO: 15502 - DNA, 21 bp, Homo sapiens
catattgtctyaataggaaaa

SEQ ID NO: 15503 - DNA, 21 bp, Homo sapiens
agagagacacygcaaggtgaa

SEQ ID NO: 15504 - DNA, 21 bp, Homo sapiens
agaagtgcctygaaatgaaag

SEQ ID NO: 15505 - DNA, 21 bp, Homo sapiens
ctaaaataccrttgtgcattt

SEQ ID NO: 15506 - DNA, 21 bp, Homo sapiens
agaatttcaaragagccacaa

SEQ ID NO: 15507 - DNA, 21 bp, Homo sapiens
cccaacaagtkgattaaacaa

SEQ ID NO: 15508 - DNA, 21 bp, Homo sapiens
gagtaggacayattttgtagt

SEQ ID NO: 15509 - DNA, 21 bp, Homo sapiens
ctcctcatcaytgcaccaaag

SEQ ID NO: 15510 - DNA, 21 bp, Homo sapiens
ggcttggtagyattaaaaaga

SEQ ID NO: 15511 - DNA, 21 bp, Homo sapiens
tatatactcarcagaaacaac

SEQ ID NO: 15512 - DNA, 21 bp, Homo sapiens
gaaaacaaatmtttaacaatc

SEQ ID NO: 15513 - DNA, 21 bp, Homo sapiens
attcaacttcygaaagggaga

SEQ ID NO: 15514 - DNA, 21 bp, Homo sapiens
tttccttatcytaaattggtc

SEQ ID NO: 15515 - DNA, 21 bp, Homo sapiens
aactatatatyggatgtattc

SEQ ID NO: 15516 - DNA, 21 bp, Homo sapiens
ttaggcagagytgtgacacag

SEQ ID NO: 15517 - DNA, 21 bp, Homo sapiens
gactacacgcrcacgtgcaca

SEQ ID NO: 15518 - DNA, 21 bp, Homo sapiens
atgctcatatrtggctagtga

SEQ ID NO: 15519 - DNA, 21 bp, Homo sapiens
agttctcaatkaccctttctt

SEQ ID NO: 15520 - DNA, 21 bp, Homo sapiens
gtgatgtgatmcagtcttcta

SEQ ID NO: 15521 - DNA, 21 bp, Homo sapiens
ttcccttccaycataattggc

SEQ ID NO: 15522 - DNA, 21 bp, Homo sapiens
ccagccagtarccatttcata

SEQ ID NO: 15523 - DNA, 21 bp, Homo sapiens
ccaacttcatmatttcactcc

SEQ ID NO: 15524 - DNA, 21 bp, Homo sapiens
cacacactcayggcttagaaa

SEQ ID NO: 15525 - DNA, 21 bp, Homo sapiens
gatgattagtktacatctatt

SEQ ID NO: 15526 - DNA, 21 bp, Homo sapiens
gagccactaaycatgaaagaa

SEQ ID NO: 15527 - DNA, 21 bp, Homo sapiens
tggggggcctkggggcggcgg

SEQ ID NO: 15528 - DNA, 21 bp, Homo sapiens
gcagtcatttktacgtgtggt

SEQ ID NO: 15529 - DNA, 21 bp, Homo sapiens
ctggctctaaytaagtaacat

SEQ ID NO: 15530 - DNA, 21 bp, Homo sapiens
gaataacacarggaaaataat

SEQ ID NO: 15531 - DNA, 21 bp, Homo sapiens
acacctcactkcaaggcctac

SEQ ID NO: 15532 - DNA, 21 bp, Homo sapiens
acttaatcttyagccagttca

SEQ ID NO: 15533 - DNA, 21 bp, Homo sapiens
atatggtctgytgatgtaact

SEQ ID NO: 15534 - DNA, 21 bp, Homo sapiens
cttcatatacyatatcttgct

SEQ ID NO: 15535 - DNA, 21 bp, Homo sapiens
gattcttccarcagcctcatg

SEQ ID NO: 15536 - DNA, 21 bp, Homo sapiens
aaaccctacayatctaaaacc

SEQ ID NO: 15537 - DNA, 21 bp, Homo sapiens
agtatttaatyggaacattat

SEQ ID NO: 15538 - DNA, 21 bp, Homo sapiens
tactttctttyccaagagaag

SEQ ID NO: 15539 - DNA, 21 bp, Homo sapiens
ggttttggccrccataatgga

SEQ ID NO: 15540 - DNA, 21 bp, Homo sapiens
ggaaatcccayagtggctcaa

SEQ ID NO: 15541 - DNA, 21 bp, Homo sapiens
gaaatcccacrgtggctcaag

SEQ ID NO: 15542 - DNA, 21 bp, Homo sapiens
ctttcccttcyacatggagtt

SEQ ID NO: 15543 - DNA, 21 bp, Homo sapiens
gcattactacmgtgtgaactg

SEQ ID NO: 15544 - DNA, 21 bp, Homo sapiens
taatgcaggartaaacagctg

SEQ ID NO: 15545 - DNA, 21 bp, Homo sapiens
gtaaagtggayggcatggagt

SEQ ID NO: 15546 - DNA, 21 bp, Homo sapiens
tgggaggagtragaggaatct

SEQ ID NO: 15547 - DNA, 21 bp, Homo sapiens
ttattgacttyattattcttc

SEQ ID NO: 15548 - DNA, 21 bp, Homo sapiens
cttcattattmttcactgttc

SEQ ID NO: 15549 - DNA, 21 bp, Homo sapiens
tgcttacagaktttcccgtct

SEQ ID NO: 15550 - DNA, 21 bp, Homo sapiens
ggtaagagggmcttgcacttt

SEQ ID NO: 15551 - DNA, 21 bp, Homo sapiens
aaaaacataaytgaagatcga

SEQ ID NO: 15552 - DNA, 21 bp, Homo sapiens
agagaggactrccttatcatg

SEQ ID NO: 15553 - DNA, 21 bp, Homo sapiens
gtatttacaayacctttggtt

SEQ ID NO: 15554 - DNA, 21 bp, Homo sapiens
cagagcacctmggaccagcgg

SEQ ID NO: 15555 - DNA, 21 bp, Homo sapiens
ttttatttagygaacagttca

SEQ ID NO: 15556 - DNA, 21 bp, Homo sapiens
gatgaatacaygattaagagc

SEQ ID NO: 15557 - DNA, 21 bp, Homo sapiens
cctcaactctygggcaggtgg

SEQ ID NO: 15558 - DNA, 21 bp, Homo sapiens
ccatctattcrtattttgttt

SEQ ID NO: 15559 - DNA, 21 bp, Homo sapiens
atcaaagtgartgtccgccaa

SEQ ID NO: 15560 - DNA, 21 bp, Homo sapiens
atcttgggcarattacaaaat

SEQ ID NO: 15561 - DNA, 21 bp, Homo sapiens
cgatggttgckttccagctac

SEQ ID NO: 15562 - DNA, 21 bp, Homo sapiens
gataaaataakattgctatgt

SEQ ID NO: 15563 - DNA, 21 bp, Homo sapiens
tctctggaagytttcaaatca

SEQ ID NO: 15564 - DNA, 21 bp, Homo sapiens
catcaaggctyacgggcaatg

SEQ ID NO: 15565 - DNA, 21 bp, Homo sapiens
tttccagagamtctttgggcc

SEQ ID NO: 15566 - DNA, 21 bp, Homo sapiens
tgtaatcttcytgaggactta

SEQ ID NO: 15567 - DNA, 21 bp, Homo sapiens
caccattcctygcacagtgac

SEQ ID NO: 15568 - DNA, 21 bp, Homo sapiens
acttgagtatrtgcctaaaac

SEQ ID NO: 15569 - DNA, 21 bp, Homo sapiens
atcaacaaggyttaatctctc

SEQ ID NO: 15570 - DNA, 21 bp, Homo sapiens
tttcaaccacyacaaaaattg

SEQ ID NO: 15571 - DNA, 21 bp, Homo sapiens
agaggtgaaaygtggctgaag

SEQ ID NO: 15572 - DNA, 21 bp, Homo sapiens
cctggggctgrtgtaacaaat

SEQ ID NO: 15573 - DNA, 21 bp, Homo sapiens
tacccactatyacagctccac

SEQ ID NO: 15574 - DNA, 21 bp, Homo sapiens
ctatgacaggyctcatgataa

SEQ ID NO: 15575 - DNA, 21 bp, Homo sapiens
taacagcaggrctggaaattt

SEQ ID NO: 15576 - DNA, 21 bp, Homo sapiens
catcaaagtgrgcggcaatat

SEQ ID NO: 15577 - DNA, 21 bp, Homo sapiens
taaaagacatrgccaacaatg

SEQ ID NO: 15578 - DNA, 21 bp, Homo sapiens
aaccagacaaytataccacaa

SEQ ID NO: 15579 - DNA, 21 bp, Homo sapiens
aatccagctayattatgatct

SEQ ID NO: 15580 - DNA, 21 bp, Homo sapiens
ctacaatccayttcagtgcac

SEQ ID NO: 15581 - DNA, 21 bp, Homo sapiens
caaccaaatcmtatgagctga

SEQ ID NO: 15582 - DNA, 21 bp, Homo sapiens
acattaaccartctagaaaac

SEQ ID NO: 15583 - DNA, 21 bp, Homo sapiens
atagaatatayatttgttgga

SEQ ID NO: 15584 - DNA, 21 bp, Homo sapiens
cacctcccaayaattttctct

SEQ ID NO: 15585 - DNA, 21 bp, Homo sapiens
tatctgtgatytcttacaaat

SEQ ID NO: 15586 - DNA, 21 bp, Homo sapiens
catgttcttaktaactgatgt

SEQ ID NO: 15587 - DNA, 21 bp, Homo sapiens
aacagataccrtagagctcaa

SEQ ID NO: 15588 - DNA, 21 bp, Homo sapiens
tgactcttaayattacggagt

SEQ ID NO: 15589 - DNA, 21 bp, Homo sapiens
agcacactggygggccaggaa

SEQ ID NO: 15590 - DNA, 21 bp, Homo sapiens
cacttgccaargtgagggtgt

SEQ ID NO: 15591 - DNA, 21 bp, Homo sapiens
taggttttatytgggtgagca

SEQ ID NO: 15592 - DNA, 21 bp, Homo sapiens
agtcatagttktatttgtcac

SEQ ID NO: 15593 - DNA, 21 bp, Homo sapiens
ggaagggtccrctggggaagt

SEQ ID NO: 15594 - DNA, 21 bp, Homo sapiens
agcgtgctacraggagggctg

SEQ ID NO: 15595 - DNA, 21 bp, Homo sapiens
tttgtcaaagmaagtcatatg

SEQ ID NO: 15596 - DNA, 21 bp, Homo sapiens
tccaactcttygtgattcctt

SEQ ID NO: 15597 - DNA, 21 bp, Homo sapiens
acagatactgytgttatatca

SEQ ID NO: 15598 - DNA, 21 bp, Homo sapiens
ggaactgattyacacttgatt

SEQ ID NO: 15599 - DNA, 21 bp, Homo sapiens
acagcaaaatkcatgccaaag

SEQ ID NO: 15600 - DNA, 21 bp, Homo sapiens
tattatgttcmttagcttgac

SEQ ID NO: 15601 - DNA, 21 bp, Homo sapiens
accatactacrgccctgggag

SEQ ID NO: 15602 - DNA, 21 bp, Homo sapiens
gttgatcactrtccccttccc

SEQ ID NO: 15603 - DNA, 21 bp, Homo sapiens
aaatacatgcycaggagaaca

SEQ ID NO: 15604 - DNA, 21 bp, Homo sapiens
ctgggtgcatyctcaaccttg

SEQ ID NO: 15605 - DNA, 21 bp, Homo sapiens
ggtgcctaagrgacactactc

SEQ ID NO: 15606 - DNA, 21 bp, Homo sapiens
aaggggtgatkgggacataag

SEQ ID NO: 15607 - DNA, 21 bp, Homo sapiens
ctaccactttrcagagttgga

SEQ ID NO: 15608 - DNA, 21 bp, Homo sapiens
tgaacagttgycagtcttttg

SEQ ID NO: 15609 - DNA, 21 bp, Homo sapiens
tagcatgtgaygaaggtttgg

SEQ ID NO: 15610 - DNA, 21 bp, Homo sapiens
tttcctgtatratctttacag

SEQ ID NO: 15611 - DNA, 21 bp, Homo sapiens
gcagtggatcrtttggaaggg

SEQ ID NO: 15612 - DNA, 21 bp, Homo sapiens
agaactatgcyttggaggaag

SEQ ID NO: 15613 - DNA, 21 bp, Homo sapiens
tcacctgttarggcggttgct

SEQ ID NO: 15614 - DNA, 21 bp, Homo sapiens
aggaattccarggaggaagag

SEQ ID NO: 15615 - DNA, 21 bp, Homo sapiens
ggatccaggartattttcttc

SEQ ID NO: 15616 - DNA, 21 bp, Homo sapiens
catatgttgcrtaagagctaa

SEQ ID NO: 15617 - DNA, 21 bp, Homo sapiens
cagtggtcacktgtcttttac

SEQ ID NO: 15618 - DNA, 21 bp, Homo sapiens
gaagccacttyttgctaaatg

SEQ ID NO: 15619 - DNA, 21 bp, Homo sapiens
ttatctctagytggtttttac

SEQ ID NO: 15620 - DNA, 21 bp, Homo sapiens
actaaaacagrctttagaacc

SEQ ID NO: 15621 - DNA, 21 bp, Homo sapiens
gggaactggtrtatgaataca

SEQ ID NO: 15622 - DNA, 21 bp, Homo sapiens
tagaaagtaaygttagtcgaa

SEQ ID NO: 15623 - DNA, 21 bp, Homo sapiens
gttttgctggkagttaagacc

SEQ ID NO: 15624 - DNA, 21 bp, Homo sapiens
ttcccatgacyctgttagtgt

SEQ ID NO: 15625 - DNA, 21 bp, Homo sapiens
agagcctttarctcactgtgt

SEQ ID NO: 15626 - DNA, 21 bp, Homo sapiens
ctcggtaagaragaactctca

SEQ ID NO: 15627 - DNA, 21 bp, Homo sapiens
gacaaagtctytgaaactgga

SEQ ID NO: 15628 - DNA, 21 bp, Homo sapiens
cgaggaggagrttggtgacag

SEQ ID NO: 15629 - DNA, 21 bp, Homo sapiens
tagcttctcaygagggaagga

SEQ ID NO: 15630 - DNA, 21 bp, Homo sapiens
aattgctagayttagagaaag

SEQ ID NO: 15631 - DNA, 21 bp, Homo sapiens
ttctgggtctrtctttgacca

SEQ ID NO: 15632 - DNA, 21 bp, Homo sapiens
tatcttggcaygtgaaatttt

SEQ ID NO: 15633 - DNA, 21 bp, Homo sapiens
tgatcaaacaktcctcttccc

SEQ ID NO: 15634 - DNA, 21 bp, Homo sapiens
gggcttccttkccagcataac

SEQ ID NO: 15635 - DNA, 21 bp, Homo sapiens
gtgtattatayacccagacga

SEQ ID NO: 15636 - DNA, 21 bp, Homo sapiens
aaaactaattygttcactgaa

SEQ ID NO: 15637 - DNA, 21 bp, Homo sapiens
cataactactrgggggggaaa

SEQ ID NO: 15638 - DNA, 21 bp, Homo sapiens
aacatagaaaktttaggggga

SEQ ID NO: 15639 - DNA, 21 bp, Homo sapiens
tatttcatctrtagaaataac

SEQ ID NO: 15640 - DNA, 21 bp, Homo sapiens
cttaccagttyattccttaat

SEQ ID NO: 15641 - DNA, 21 bp, Homo sapiens
tatgtaaccaytcccttaaag

SEQ ID NO: 15642 - DNA, 21 bp, Homo sapiens
ccaagtcctgmcccccaccct

SEQ ID NO: 15643 - DNA, 21 bp, Homo sapiens
agtttccaggyagccttcaat

SEQ ID NO: 15644 - DNA, 21 bp, Homo sapiens
caactttatcmctgatctcca

SEQ ID NO: 15645 - DNA, 21 bp, Homo sapiens
tattagtttgmaaagggtgat

SEQ ID NO: 15646 - DNA, 21 bp, Homo sapiens
aagccactggyaactcacgct

SEQ ID NO: 15647 - DNA, 21 bp, Homo sapiens
ggttgactttytcccatagat

SEQ ID NO: 15648 - DNA, 21 bp, Homo sapiens
tcatccccagygtgagacagg

SEQ ID NO: 15649 - DNA, 21 bp, Homo sapiens
gtattaaatcrtgcccttttt

SEQ ID NO: 15650 - DNA, 21 bp, Homo sapiens
caagaactgcyaacagtggct

SEQ ID NO: 15651 - DNA, 21 bp, Homo sapiens
gatatattccrtaagtgttga

SEQ ID NO: 15652 - DNA, 21 bp, Homo sapiens
ccagtccatgracgtgtggta

SEQ ID NO: 15653 - DNA, 21 bp, Homo sapiens
tgagtgaggtkgttttaagaa

SEQ ID NO: 15654 - DNA, 21 bp, Homo sapiens
agcatcacgargatttttttt

SEQ ID NO: 15655 - DNA, 21 bp, Homo sapiens
gctcagtgccrgagacgtcag

SEQ ID NO: 15656 - DNA, 21 bp, Homo sapiens
aggatttatakaagtgcataa

SEQ ID NO: 15657 - DNA, 21 bp, Homo sapiens
catcgtatcayttcctcatta

SEQ ID NO: 15658 - DNA, 21 bp, Homo sapiens
aatcttggagraagggtttcc

SEQ ID NO: 15659 - DNA, 21 bp, Homo sapiens
actgtgtgccrtacctcccca

SEQ ID NO: 15660 - DNA, 21 bp, Homo sapiens
tacttaatggygagatattga

SEQ ID NO: 15661 - DNA, 21 bp, Homo sapiens
catatcttggygcatgtaact

SEQ ID NO: 15662 - DNA, 21 bp, Homo sapiens
aaaaaagtccyggatgtagaa

SEQ ID NO: 15663 - DNA, 21 bp, Homo sapiens
atgccaataartcaaatgact

SEQ ID NO: 15664 - DNA, 21 bp, Homo sapiens
gagtatgagaktaggaagaaa

SEQ ID NO: 15665 - DNA, 21 bp, Homo sapiens
agatgaggggmgtgaaataca

SEQ ID NO: 15666 - DNA, 21 bp, Homo sapiens
ttatctatacytactctgatt

SEQ ID NO: 15667 - DNA, 21 bp, Homo sapiens
gatatgcttakttttgcaggg

SEQ ID NO: 15668 - DNA, 21 bp, Homo sapiens
tttgtttaaarttctcatttt

SEQ ID NO: 15669 - DNA, 21 bp, Homo sapiens
agttgctaatkattaattgag

SEQ ID NO: 15670 - DNA, 21 bp, Homo sapiens
ttttcttgacktacagaagtg

SEQ ID NO: 15671 - DNA, 21 bp, Homo sapiens
ttatcactttrtaatggtcat

SEQ ID NO: 15672 - DNA, 21 bp, Homo sapiens
ctagcacagcrtttcttcatt

SEQ ID NO: 15673 - DNA, 21 bp, Homo sapiens
catttctgaargtcacagtcc

SEQ ID NO: 15674 - DNA, 21 bp, Homo sapiens
acgtagcattmatctctaggt

SEQ ID NO: 15675 - DNA, 21 bp, Homo sapiens
gaatcaggttytccttgggga

SEQ ID NO: 15676 - DNA, 21 bp, Homo sapiens
aatcaccagcrgcctgagtgt

SEQ ID NO: 15677 - DNA, 21 bp, Homo sapiens
atctttatacmaaatggcctc

SEQ ID NO: 15678 - DNA, 21 bp, Homo sapiens
cagagagtagmtaagaaaata

SEQ ID NO: 15679 - DNA, 21 bp, Homo sapiens
tctctattctrtggttttctc

SEQ ID NO: 15680 - DNA, 21 bp, Homo sapiens
ctgctttcagrtctctctgtg

SEQ ID NO: 15681 - DNA, 21 bp, Homo sapiens
gaagacttctrttagtacttc

SEQ ID NO: 15682 - DNA, 21 bp, Homo sapiens
tggagagctargtaggaacca

SEQ ID NO: 15683 - DNA, 21 bp, Homo sapiens
aaatggtaagycatcaaaaaa

SEQ ID NO: 15684 - DNA, 21 bp, Homo sapiens
aaaccagcackgagacctgaa

SEQ ID NO: 15685 - DNA, 21 bp, Homo sapiens
cccacccccayagtctgggtg

SEQ ID NO: 15686 - DNA, 21 bp, Homo sapiens
ctgagctgtgkgaagagctaa

SEQ ID NO: 15687 - DNA, 21 bp, Homo sapiens
gcccggtatgrtagctcacgc

SEQ ID NO: 15688 - DNA, 21 bp, Homo sapiens
caggagttccrgccttggcca

SEQ ID NO: 15689 - DNA, 21 bp, Homo sapiens
tttttcaacgyttacaaagca

SEQ ID NO: 15690 - DNA, 21 bp, Homo sapiens
cccagctgtcmtcatccatat

SEQ ID NO: 15691 - DNA, 21 bp, Homo sapiens
ttcccaggggkttaggtctct

SEQ ID NO: 15692 - DNA, 21 bp, Homo sapiens
gtgggaaaatygtcgaagttc

SEQ ID NO: 15693 - DNA, 21 bp, Homo sapiens
tatagaggcarcctgaatagt

SEQ ID NO: 15694 - DNA, 21 bp, Homo sapiens
tatcaacctgkttccatgaat

SEQ ID NO: 15695 - DNA, 21 bp, Homo sapiens
gcttggtacayggccatgtgg

SEQ ID NO: 15696 - DNA, 21 bp, Homo sapiens
agattaagacrgttgccattc

SEQ ID NO: 15697 - DNA, 21 bp, Homo sapiens
tttctttcttyagtttttgct

SEQ ID NO: 15698 - DNA, 21 bp, Homo sapiens
tgacgccagcrttagtgttgc

SEQ ID NO: 15699 - DNA, 21 bp, Homo sapiens
tggaaatccarcaatgtggaa

SEQ ID NO: 15700 - DNA, 21 bp, Homo sapiens
ccctacttgckggtagtatgt

SEQ ID NO: 15701 - DNA, 21 bp, Homo sapiens
tatgtttgtayatcaggatat

SEQ ID NO: 15702 - DNA, 21 bp, Homo sapiens
agaaagggtayagggaaacct

SEQ ID NO: 15703 - DNA, 21 bp, Homo sapiens
catgtcattgyaacctacata

SEQ ID NO: 15704 - DNA, 21 bp, Homo sapiens
cttgctatgcrtttggcactt

SEQ ID NO: 15705 - DNA, 21 bp, Homo sapiens
cccccctgtgrgcaagaactt

SEQ ID NO: 15706 - DNA, 21 bp, Homo sapiens
ccagattgccraagtctgttt

SEQ ID NO: 15707 - DNA, 21 bp, Homo sapiens
cttacatttcyctattaatct

SEQ ID NO: 15708 - DNA, 21 bp, Homo sapiens
aaagctgaagrcagattgtct

SEQ ID NO: 15709 - DNA, 21 bp, Homo sapiens
tgaaaaattgygggcaaacat

SEQ ID NO: 15710 - DNA, 21 bp, Homo sapiens
aacctgaaagkatgagactga

SEQ ID NO: 15711 - DNA, 21 bp, Homo sapiens
atattaaagtktagttctgat

SEQ ID NO: 15712 - DNA, 21 bp, Homo sapiens
tttaccattcrccagttctat

SEQ ID NO: 15713 - DNA, 21 bp, Homo sapiens
gctgcattgaytggaacaatt

SEQ ID NO: 15714 - DNA, 21 bp, Homo sapiens
tctctattaamgtctccttca

SEQ ID NO: 15715 - DNA, 21 bp, Homo sapiens
tcttttagatrttgattgagc

SEQ ID NO: 15716 - DNA, 21 bp, Homo sapiens
atagcaatagmgttttctctg

SEQ ID NO: 15717 - DNA, 21 bp, Homo sapiens
tagcctactgytcctaggcta

SEQ ID NO: 15718 - DNA, 21 bp, Homo sapiens
ttaaaggtcartattacaaag

SEQ ID NO: 15719 - DNA, 21 bp, Homo sapiens
gcatccaatcrgtgaatacag

SEQ ID NO: 15720 - DNA, 21 bp, Homo sapiens
caccaggccayggaccattaa

SEQ ID NO: 15721 - DNA, 21 bp, Homo sapiens
agctgtgaccrcatataaaag

SEQ ID NO: 15722 - DNA, 21 bp, Homo sapiens
tctggtcagtratccatagaa

SEQ ID NO: 15723 - DNA, 21 bp, Homo sapiens
tctgaatagaytcaaggctgt

SEQ ID NO: 15724 - DNA, 21 bp, Homo sapiens
aaaccatatgmtcttttcaat

SEQ ID NO: 15725 - DNA, 21 bp, Homo sapiens
gctttaagaaragcaaggctt

SEQ ID NO: 15726 - DNA, 21 bp, Homo sapiens
tttaaaatatyatccattcca

SEQ ID NO: 15727 - DNA, 21 bp, Homo sapiens
ctgttcaaacrgctactacca

SEQ ID NO: 15728 - DNA, 21 bp, Homo sapiens
cacacaaaaakaaacttcaaa

SEQ ID NO: 15729 - DNA, 21 bp, Homo sapiens
gcagtctggtyctgaaacttc

SEQ ID NO: 15730 - DNA, 21 bp, Homo sapiens
caccacatcartgtttacggt

SEQ ID NO: 15731 - DNA, 21 bp, Homo sapiens
ccatgacctaycgttaatttc

SEQ ID NO: 15732 - DNA, 21 bp, Homo sapiens
ttctttgagakatctccaagt

SEQ ID NO: 15733 - DNA, 21 bp, Homo sapiens
gaaacctgagyaaagagcttt

SEQ ID NO: 15734 - DNA, 21 bp, Homo sapiens
gctcgttgtayttgtttaaaa

SEQ ID NO: 15735 - DNA, 21 bp, Homo sapiens
tctatgtaatmcttgcaatta

SEQ ID NO: 15736 - DNA, 21 bp, Homo sapiens
gcaccgtgctmagtactttaa

SEQ ID NO: 15737 - DNA, 21 bp, Homo sapiens
tatctcattgyggttgtgatg

SEQ ID NO: 15738 - DNA, 21 bp, Homo sapiens
ttgatgtatgyaaaaaataag

SEQ ID NO: 15739 - DNA, 21 bp, Homo sapiens
tagtcttagarggttgatcaa

SEQ ID NO: 15740 - DNA, 21 bp, Homo sapiens
ccagaggaagrgagagggaca

SEQ ID NO: 15741 - DNA, 21 bp, Homo sapiens
gttttaccttrcacttaactc

SEQ ID NO: 15742 - DNA, 21 bp, Homo sapiens
ctacctgagtragcacagttt

SEQ ID NO: 15743 - DNA, 21 bp, Homo sapiens
atcataagtaygagaattcaa

SEQ ID NO: 15744 - DNA, 21 bp, Homo sapiens
atgacttgctrgtatacccta

SEQ ID NO: 15745 - DNA, 21 bp, Homo sapiens
aagaactttckggcctttcaa

SEQ ID NO: 15746 - DNA, 21 bp, Homo sapiens
ctacccttctytcttatctcc

SEQ ID NO: 15747 - DNA, 21 bp, Homo sapiens
agccaaatgayctaattttaa

SEQ ID NO: 15748 - DNA, 21 bp, Homo sapiens
accacacagtyctgtgtccat

SEQ ID NO: 15749 - DNA, 21 bp, Homo sapiens
cttccttacakactaattttc

SEQ ID NO: 15750 - DNA, 21 bp, Homo sapiens
ggtggtaggaytgacgaagaa

SEQ ID NO: 15751 - DNA, 21 bp, Homo sapiens
aagaggagagrcttccacaaa

SEQ ID NO: 15752 - DNA, 21 bp, Homo sapiens
ggttcaacctrgagtataaga

SEQ ID NO: 15753 - DNA, 21 bp, Homo sapiens
atgccaagcaraaagagatca

SEQ ID NO: 15754 - DNA, 21 bp, Homo sapiens
caagaacagtrtctcactaaa

SEQ ID NO: 15755 - DNA, 21 bp, Homo sapiens
ggaggtttgcmaaagctaaag

SEQ ID NO: 15756 - DNA, 21 bp, Homo sapiens
tcctccattgytggaataaat

SEQ ID NO: 15757 - DNA, 21 bp, Homo sapiens
ctattcaacaytgcaataact

SEQ ID NO: 15758 - DNA, 21 bp, Homo sapiens
gtttttgccgrgactagttcc

SEQ ID NO: 15759 - DNA, 21 bp, Homo sapiens
aattggaccartgtgatcctc

SEQ ID NO: 15760 - DNA, 21 bp, Homo sapiens
ttacagacaartactgcatat

SEQ ID NO: 15761 - DNA, 21 bp, Homo sapiens
ctgttctacayatgatacctg

SEQ ID NO: 15762 - DNA, 21 bp, Homo sapiens
tgttgcctttygctccatcta

SEQ ID NO: 15763 - DNA, 21 bp, Homo sapiens
atactaatttmtacctcatca

SEQ ID NO: 15764 - DNA, 21 bp, Homo sapiens
gcttgaagagkgatttgttta

SEQ ID NO: 15765 - DNA, 21 bp, Homo sapiens
ttaatacttcrttgtatcagc

SEQ ID NO: 15766 - DNA, 21 bp, Homo sapiens
agaggggaacrtttgcacaga

SEQ ID NO: 15767 - DNA, 21 bp, Homo sapiens
aggtctccacrttgatcctgg

SEQ ID NO: 15768 - DNA, 21 bp, Homo sapiens
gacgcaagttkgaatcttgcc

SEQ ID NO: 15769 - DNA, 21 bp, Homo sapiens
taatttttaaytctataacct

SEQ ID NO: 15770 - DNA, 21 bp, Homo sapiens
aataaataaayaaataaaccc

SEQ ID NO: 15771 - DNA, 21 bp, Homo sapiens
agccaagaggrtaccggatca

SEQ ID NO: 15772 - DNA, 21 bp, Homo sapiens
tgacccctccmcaaagaccca

SEQ ID NO: 15773 - DNA, 21 bp, Homo sapiens
acaggcttccrtgatccttca

SEQ ID NO: 15774 - DNA, 21 bp, Homo sapiens
atattaccatytttcagcccc

SEQ ID NO: 15775 - DNA, 21 bp, Homo sapiens
agtgggacctrctttcatttt

SEQ ID NO: 15776 - DNA, 21 bp, Homo sapiens
aggctttgctmcctacctgag

SEQ ID NO: 15777 - DNA, 21 bp, Homo sapiens
ctttggcttakttatatttgg

SEQ ID NO: 15778 - DNA, 21 bp, Homo sapiens
gtgccagaccytgaagaaacc

SEQ ID NO: 15779 - DNA, 21 bp, Homo sapiens
tgaagactctytgctcctctg

SEQ ID NO: 15780 - DNA, 21 bp, Homo sapiens
aacagagaaaytctaaggaga

SEQ ID NO: 15781 - DNA, 21 bp, Homo sapiens
gtcaaaggccrcatgaaagca

SEQ ID NO: 15782 - DNA, 21 bp, Homo sapiens
ggatttaatgrgttaatagat

SEQ ID NO: 15783 - DNA, 21 bp, Homo sapiens
attttgctttmttgaggaaaa

SEQ ID NO: 15784 - DNA, 21 bp, Homo sapiens
aagctgcatgygaactcaaag

SEQ ID NO: 15785 - DNA, 21 bp, Homo sapiens
gtgagttactmctgcaggcat

SEQ ID NO: 15786 - DNA, 21 bp, Homo sapiens
ttaaaagtccrtgggttatgg

SEQ ID NO: 15787 - DNA, 21 bp, Homo sapiens
aaaaacaaacytattcttcct

SEQ ID NO: 15788 - DNA, 21 bp, Homo sapiens
aagtagctcayagtctcccat

SEQ ID NO: 15789 - DNA, 21 bp, Homo sapiens
gattaaaagarttaattattg

SEQ ID NO: 15790 - DNA, 21 bp, Homo sapiens
gtaatttatgmatccaaactt

SEQ ID NO: 15791 - DNA, 21 bp, Homo sapiens
ctgtcaagtgygcatcaaaac

SEQ ID NO: 15792 - DNA, 21 bp, Homo sapiens
aattctattayagggaatccc

SEQ ID NO: 15793 - DNA, 21 bp, Homo sapiens
aaaccttgtayctagaggaga

SEQ ID NO: 15794 - DNA, 21 bp, Homo sapiens
caggttaacamactgtgttta

SEQ ID NO: 15795 - DNA, 21 bp, Homo sapiens
catgcgtcccrtgaacaagga

SEQ ID NO: 15796 - DNA, 21 bp, Homo sapiens
tgtttctaggycacaggattg

SEQ ID NO: 15797 - DNA, 21 bp, Homo sapiens
cactgtgcccktagactaagt

SEQ ID NO: 15798 - DNA, 21 bp, Homo sapiens
tcatgggttcyaaaaggaaat

SEQ ID NO: 15799 - DNA, 21 bp, Homo sapiens
atacattgtcygtcattaatc

SEQ ID NO: 15800 - DNA, 21 bp, Homo sapiens
ttcttcagccycatgctggag

SEQ ID NO: 15801 - DNA, 21 bp, Homo sapiens
cctgccctctrgaacagcctg

SEQ ID NO: 15802 - DNA, 21 bp, Homo sapiens
attcagtggcyttccgcttct

SEQ ID NO: 15803 - DNA, 21 bp, Homo sapiens
gtgtcatgtgytggaaaggtg

SEQ ID NO: 15804 - DNA, 21 bp, Homo sapiens
agtcctttgtmataaactggt

SEQ ID NO: 15805 - DNA, 21 bp, Homo sapiens
gatggcagcgktcagggattt

SEQ ID NO: 15806 - DNA, 21 bp, Homo sapiens
gagcaagactraaatataaaa

SEQ ID NO: 15807 - DNA, 21 bp, Homo sapiens
tggaattcacrcactgtcact

SEQ ID NO: 15808 - DNA, 21 bp, Homo sapiens
cacattaggaraatggataga

SEQ ID NO: 15809 - DNA, 21 bp, Homo sapiens
catgcaaggcrtctgccattc

SEQ ID NO: 15810 - DNA, 21 bp, Homo sapiens
cagtagtgaaygaagtaaaag

SEQ ID NO: 15811 - DNA, 21 bp, Homo sapiens
tgttatctccytagagacaga

SEQ ID NO: 15812 - DNA, 21 bp, Homo sapiens
tcacattctcyttcacctaga

SEQ ID NO: 15813 - DNA, 21 bp, Homo sapiens
tgatacagaayggaaatagag

SEQ ID NO: 15814 - DNA, 21 bp, Homo sapiens
aacagcgttgyacaaaagttc

SEQ ID NO: 15815 - DNA, 21 bp, Homo sapiens
gctgggacctyagaggaaggg

SEQ ID NO: 15816 - DNA, 21 bp, Homo sapiens
ggtgtttggaygtgaatcacc

SEQ ID NO: 15817 - DNA, 21 bp, Homo sapiens
atcatcgacgyagggggagtt

SEQ ID NO: 15818 - DNA, 21 bp, Homo sapiens
ccagatacagrgattcagaat

SEQ ID NO: 15819 - DNA, 21 bp, Homo sapiens
gatcttagcaktgacaacacc

SEQ ID NO: 15820 - DNA, 21 bp, Homo sapiens
caaggaaagcrttaaaggaga

SEQ ID NO: 15821 - DNA, 21 bp, Homo sapiens
agagaagagtrttagaattct

SEQ ID NO: 15822 - DNA, 21 bp, Homo sapiens
ctgggtgtcayacgtggacat

SEQ ID NO: 15823 - DNA, 21 bp, Homo sapiens
caggtagcgtyactaggatct

SEQ ID NO: 15824 - DNA, 21 bp, Homo sapiens
tgaggtgctgygctctcgctg

SEQ ID NO: 15825 - DNA, 21 bp, Homo sapiens
ggctgaggtgrccaccgagtg

SEQ ID NO: 15826 - DNA, 21 bp, Homo sapiens
catggccttgrgggaacctaa

SEQ ID NO: 15827 - DNA, 21 bp, Homo sapiens
cctcatgtctycacaaccttc

SEQ ID NO: 15828 - DNA, 21 bp, Homo sapiens
ctttgggaagygctgcagcca

SEQ ID NO: 15829 - DNA, 21 bp, Homo sapiens
aggctttgggrttactttact

SEQ ID NO: 15830 - DNA, 21 bp, Homo sapiens
caggcttagcrttgggtttta

SEQ ID NO: 15831 - DNA, 21 bp, Homo sapiens
gctccatattycaccacgtca

SEQ ID NO: 15832 - DNA, 21 bp, Homo sapiens
cccaaacaatycctacatggg

SEQ ID NO: 15833 - DNA, 21 bp, Homo sapiens
ccttcaccacraggagtagcc

SEQ ID NO: 15834 - DNA, 21 bp, Homo sapiens
cactgataaaygccactggga

SEQ ID NO: 15835 - DNA, 21 bp, Homo sapiens
agattccttarcgacttgctt

SEQ ID NO: 15836 - DNA, 21 bp, Homo sapiens
ggagttgaagrtgcttttctc

SEQ ID NO: 15837 - DNA, 21 bp, Homo sapiens
cactaatccgkcccctgcatt

SEQ ID NO: 15838 - DNA, 21 bp, Homo sapiens
gaatactactyagcaatatat

SEQ ID NO: 15839 - DNA, 21 bp, Homo sapiens
acccacccaayaccaaagagg

SEQ ID NO: 15840 - DNA, 21 bp, Homo sapiens
tagggtggaamcaaacattct

SEQ ID NO: 15841 - DNA, 21 bp, Homo sapiens
aattagccacyctttccccaa

SEQ ID NO: 15842 - DNA, 21 bp, Homo sapiens
gtttagaagcyggttcctcca

SEQ ID NO: 15843 - DNA, 21 bp, Homo sapiens
atggggaaacygaggcttggt

SEQ ID NO: 15844 - DNA, 21 bp, Homo sapiens
gaaaagtagaycacagacgct

SEQ ID NO: 15845 - DNA, 21 bp, Homo sapiens
tacttagccaycctcacccct

SEQ ID NO: 15846 - DNA, 21 bp, Homo sapiens
acacaaacacrtgtcccccaa

SEQ ID NO: 15847 - DNA, 21 bp, Homo sapiens
ccaagctcttytccacttcag

SEQ ID NO: 15848 - DNA, 21 bp, Homo sapiens
cctctcccccragccaatgcc

SEQ ID NO: 15849 - DNA, 21 bp, Homo sapiens
taaaatccccracatggtgac

SEQ ID NO: 15850 - DNA, 21 bp, Homo sapiens
ggccactgaayggcactcagg

SEQ ID NO: 15851 - DNA, 21 bp, Homo sapiens
gcaaggcttcycagctggcat

SEQ ID NO: 15852 - DNA, 21 bp, Homo sapiens
tttaacaccartgaagtgtta

SEQ ID NO: 15853 - DNA, 21 bp, Homo sapiens
aaacaatcatkgtgtgtttcc

SEQ ID NO: 15854 - DNA, 21 bp, Homo sapiens
aggtccccagytgtcagcata

SEQ ID NO: 15855 - DNA, 21 bp, Homo sapiens
ggtcggctgcycttggaggac

SEQ ID NO: 15856 - DNA, 21 bp, Homo sapiens
acaaccatcaytcatgcataa

SEQ ID NO: 15857 - DNA, 21 bp, Homo sapiens
gaggaaacatratcagataat

SEQ ID NO: 15858 - DNA, 21 bp, Homo sapiens
tttgagctggyccagatgaga

SEQ ID NO: 15859 - DNA, 21 bp, Homo sapiens
agggtccccaraaggggttat

SEQ ID NO: 15860 - DNA, 21 bp, Homo sapiens
gttcaaatgtytattggttgc

SEQ ID NO: 15861 - DNA, 21 bp, Homo sapiens
agggaataagracaagaaaaa

SEQ ID NO: 15862 - DNA, 21 bp, Homo sapiens
aagagttttcyattgtgtcct

SEQ ID NO: 15863 - DNA, 21 bp, Homo sapiens
cccttctttgytcttgtcttt

SEQ ID NO: 15864 - DNA, 21 bp, Homo sapiens
gcatcctttgragactcttcc

SEQ ID NO: 15865 - DNA, 21 bp, Homo sapiens
cccagactgayttgtttgaat

SEQ ID NO: 15866 - DNA, 21 bp, Homo sapiens
agtactgtttytcccctcccc

SEQ ID NO: 15867 - DNA, 21 bp, Homo sapiens
aacagcattakagaaagaagg

SEQ ID NO: 15868 - DNA, 21 bp, Homo sapiens
gagaatgcttmtctcaattgc

SEQ ID NO: 15869 - DNA, 21 bp, Homo sapiens
caacaactccrccattagttt

SEQ ID NO: 15870 - DNA, 21 bp, Homo sapiens
aagtgattcayttgtctagca

SEQ ID NO: 15871 - DNA, 21 bp, Homo sapiens
gtgctcatcaytcactcggcc

SEQ ID NO: 15872 - DNA, 21 bp, Homo sapiens
cacagttgtaygagagaaggg

SEQ ID NO: 15873 - DNA, 21 bp, Homo sapiens
gctcacacatygtcccttgcc

SEQ ID NO: 15874 - DNA, 21 bp, Homo sapiens
aaaatcccagygagaacacac

SEQ ID NO: 15875 - DNA, 21 bp, Homo sapiens
taactttaccrtatacatata

SEQ ID NO: 15876 - DNA, 21 bp, Homo sapiens
ggggaatcctygtccttggca

SEQ ID NO: 15877 - DNA, 21 bp, Homo sapiens
caaaaataacyttaggaacca

SEQ ID NO: 15878 - DNA, 21 bp, Homo sapiens
tgctggtaatkttctgtttct

SEQ ID NO: 15879 - DNA, 21 bp, Homo sapiens
cacatgtaaaragggaggtga

SEQ ID NO: 15880 - DNA, 21 bp, Homo sapiens
gctaccagaargatacctaaa

SEQ ID NO: 15881 - DNA, 21 bp, Homo sapiens
aatatatatarttggttaccc

SEQ ID NO: 15882 - DNA, 21 bp, Homo sapiens
tgtgtgtctgragagtaggga

SEQ ID NO: 15883 - DNA, 21 bp, Homo sapiens
actcatccttygggtttaggt

SEQ ID NO: 15884 - DNA, 21 bp, Homo sapiens
ataaaagcacytatttgtgca

SEQ ID NO: 15885 - DNA, 21 bp, Homo sapiens
acaatgaattytataaggtgg

SEQ ID NO: 15886 - DNA, 21 bp, Homo sapiens
tagccactgaygaactatttc

SEQ ID NO: 15887 - DNA, 21 bp, Homo sapiens
attactctcaytttttggatg

SEQ ID NO: 15888 - DNA, 21 bp, Homo sapiens
acaacactcaytgaggtagga

SEQ ID NO: 15889 - DNA, 21 bp, Homo sapiens
acagcacctaytttctgaggt

SEQ ID NO: 15890 - DNA, 21 bp, Homo sapiens
actaaattctrtattatctct

SEQ ID NO: 15891 - DNA, 21 bp, Homo sapiens
aagagcatggygatcttgaat

SEQ ID NO: 15892 - DNA, 21 bp, Homo sapiens
ccaaaatttaytcatgtttac

SEQ ID NO: 15893 - DNA, 21 bp, Homo sapiens
ttcaataagcmtacagaagtg

SEQ ID NO: 15894 - DNA, 21 bp, Homo sapiens
cacattatccycattctttga

SEQ ID NO: 15895 - DNA, 21 bp, Homo sapiens
ctgacaggtcrttcttagtgt

SEQ ID NO: 15896 - DNA, 21 bp, Homo sapiens
atgtaacataygtgacacctg

SEQ ID NO: 15897 - DNA, 21 bp, Homo sapiens
cttgttatggyagccatagca

SEQ ID NO: 15898 - DNA, 21 bp, Homo sapiens
ctattataacyatgtcagtgt

SEQ ID NO: 15899 - DNA, 21 bp, Homo sapiens
tctttaagagyaaattcagtc

SEQ ID NO: 15900 - DNA, 21 bp, Homo sapiens
aatacaaacayagtaaaatac

SEQ ID NO: 15901 - DNA, 21 bp, Homo sapiens
gatcctacctytccttttcct

SEQ ID NO: 15902 - DNA, 21 bp, Homo sapiens
tcaaatatctrtttataggcc

SEQ ID NO: 15903 - DNA, 21 bp, Homo sapiens
acatacagttrtatgtccctt

SEQ ID NO: 15904 - DNA, 21 bp, Homo sapiens
tcttcatcagytgctctaatt

SEQ ID NO: 15905 - DNA, 21 bp, Homo sapiens
tctgcacccgraccttcttcc

SEQ ID NO: 15906 - DNA, 21 bp, Homo sapiens
tcagttaagaytccagaatga

SEQ ID NO: 15907 - DNA, 21 bp, Homo sapiens
acagggtgacyagcccaacag

SEQ ID NO: 15908 - DNA, 21 bp, Homo sapiens
agtgcatggtragatccccag

SEQ ID NO: 15909 - DNA, 21 bp, Homo sapiens
gcagggttcayggtttttttc

SEQ ID NO: 15910 - DNA, 21 bp, Homo sapiens
aggctgggggmtggggagcga

SEQ ID NO: 15911 - DNA, 21 bp, Homo sapiens
ttagtgtagayttggtgcgaa

SEQ ID NO: 15912 - DNA, 21 bp, Homo sapiens
aaaacaaagtmtcaggtcaaa

SEQ ID NO: 15913 - DNA, 21 bp, Homo sapiens
catggcggtcrttggaagtag

SEQ ID NO: 15914 - DNA, 21 bp, Homo sapiens
accccacagtygtaccccgca

SEQ ID NO: 15915 - DNA, 21 bp, Homo sapiens
cctccttgccrccttggtgtc

SEQ ID NO: 15916 - DNA, 21 bp, Homo sapiens
ctgtgactttytgcaaactcc

SEQ ID NO: 15917 - DNA, 21 bp, Homo sapiens
tagcaggtacytgggtgtacc

SEQ ID NO: 15918 - DNA, 21 bp, Homo sapiens
aggagatgggmtctaagggaa

SEQ ID NO: 15919 - DNA, 21 bp, Homo sapiens
gacttatttcyggtcacctgg

SEQ ID NO: 15920 - DNA, 21 bp, Homo sapiens
ggagtcaaccrggctgagggt

SEQ ID NO: 15921 - DNA, 21 bp, Homo sapiens
ctgttttccaycctctgaggg

SEQ ID NO: 15922 - DNA, 21 bp, Homo sapiens
agaacctacaytcaaagcctc

SEQ ID NO: 15923 - DNA, 21 bp, Homo sapiens
tttgttgcgcrtcttagcatg

SEQ ID NO: 15924 - DNA, 21 bp, Homo sapiens
gggatctgagkgagcacccat

SEQ ID NO: 15925 - DNA, 21 bp, Homo sapiens
ctgttactcgkggagggagat

SEQ ID NO: 15926 - DNA, 21 bp, Homo sapiens
agaatcttgcyctggggagga

SEQ ID NO: 15927 - DNA, 21 bp, Homo sapiens
ctagattgccraagcttactc

SEQ ID NO: 15928 - DNA, 21 bp, Homo sapiens
aataacagaarccgtccctgg

SEQ ID NO: 15929 - DNA, 21 bp, Homo sapiens
cggaacttccrgatcaccttc

SEQ ID NO: 15930 - DNA, 21 bp, Homo sapiens
tgagagcagartatccctcat

SEQ ID NO: 15931 - DNA, 21 bp, Homo sapiens
caggacccacrgggaatcaaa

SEQ ID NO: 15932 - DNA, 21 bp, Homo sapiens
aaaaattaacrgtaatgacaa

SEQ ID NO: 15933 - DNA, 21 bp, Homo sapiens
tttctgaccaycagggtgtca

SEQ ID NO: 15934 - DNA, 21 bp, Homo sapiens
ttggtgttatytcctgacacc

SEQ ID NO: 15935 - DNA, 21 bp, Homo sapiens
tctcgttggcrtttttcctag

SEQ ID NO: 15936 - DNA, 21 bp, Homo sapiens
gtactacgccytctgttttta

SEQ ID NO: 15937 - DNA, 21 bp, Homo sapiens
aaaaatacctygtaacggtaa

SEQ ID NO: 15938 - DNA, 21 bp, Homo sapiens
ttatgccagaygagacatagt

SEQ ID NO: 15939 - DNA, 21 bp, Homo sapiens
ttgattttacytttttttaga

SEQ ID NO: 15940 - DNA, 21 bp, Homo sapiens
tttctggtttyggaagcagaa

SEQ ID NO: 15941 - DNA, 21 bp, Homo sapiens
cagaagttctrctcgtaacag

SEQ ID NO: 15942 - DNA, 21 bp, Homo sapiens
gtcctcaaaaygctctcacca

SEQ ID NO: 15943 - DNA, 21 bp, Homo sapiens
taccgtaaccrtagtgtgcca

SEQ ID NO: 15944 - DNA, 21 bp, Homo sapiens
agcacaaacayggggatcttg

SEQ ID NO: 15945 - DNA, 21 bp, Homo sapiens
ttcccttgaakctcaactttg

SEQ ID NO: 15946 - DNA, 21 bp, Homo sapiens
agaccctgatragattctaca

SEQ ID NO: 15947 - DNA, 21 bp, Homo sapiens
tgcagagccaygttggagcta

SEQ ID NO: 15948 - DNA, 21 bp, Homo sapiens
attataacatrgaagaagaat

SEQ ID NO: 15949 - DNA, 21 bp, Homo sapiens
tactgtatgarataaggatcc

SEQ ID NO: 15950 - DNA, 21 bp, Homo sapiens
tgcttctcctrtgggggtgca

SEQ ID NO: 15951 - DNA, 21 bp, Homo sapiens
ggaatgtgatkagtcaatgat

SEQ ID NO: 15952 - DNA, 21 bp, Homo sapiens
ttttttattarcaataacaat

SEQ ID NO: 15953 - DNA, 21 bp, Homo sapiens
tgaaagaagcygatagaatcc

SEQ ID NO: 15954 - DNA, 21 bp, Homo sapiens
aaacatggctrtgtaaatgca

SEQ ID NO: 15955 - DNA, 21 bp, Homo sapiens
tcttacaactyaacaacaaaa

SEQ ID NO: 15956 - DNA, 21 bp, Homo sapiens
ttatttaacakgtatggatta

SEQ ID NO: 15957 - DNA, 21 bp, Homo sapiens
ccacgaagctyggtccaaagg

SEQ ID NO: 15958 - DNA, 21 bp, Homo sapiens
atttgccctayggcgacacag

SEQ ID NO: 15959 - DNA, 21 bp, Homo sapiens
acatacaaatmtgcgcatatt

SEQ ID NO: 15960 - DNA, 21 bp, Homo sapiens
gggaaggaggygccattttgc

SEQ ID NO: 15961 - DNA, 21 bp, Homo sapiens
ggtagacccarggctctgtgt

SEQ ID NO: 15962 - DNA, 21 bp, Homo sapiens
ttttttacttrtaaatgtata

SEQ ID NO: 15963 - DNA, 21 bp, Homo sapiens
aactggtttcrttaatggccc

SEQ ID NO: 15964 - DNA, 21 bp, Homo sapiens
aagtctctttyctctcttgaa

SEQ ID NO: 15965 - DNA, 21 bp, Homo sapiens
cccttctgctytgtttgcctg

SEQ ID NO: 15966 - DNA, 21 bp, Homo sapiens
tgggcagcacygggcctgagg

SEQ ID NO: 15967 - DNA, 21 bp, Homo sapiens
agcaacgtccygggttaaatt

SEQ ID NO: 15968 - DNA, 21 bp, Homo sapiens
ccatgggagcrggtgtgcttt

SEQ ID NO: 15969 - DNA, 21 bp, Homo sapiens
gaggcatggaygacaacgctt

SEQ ID NO: 15970 - DNA, 21 bp, Homo sapiens
caacaacgacrccagactgcg

SEQ ID NO: 15971 - DNA, 21 bp, Homo sapiens
taattaagacraacgggaaat

SEQ ID NO: 15972 - DNA, 21 bp, Homo sapiens
tcacactgaayaagaggattc

SEQ ID NO: 15973 - DNA, 21 bp, Homo sapiens
atatggactaygggaagatta

SEQ ID NO: 15974 - DNA, 21 bp, Homo sapiens
aactcctcagyaggagtggaa

SEQ ID NO: 15975 - DNA, 21 bp, Homo sapiens
gccagagcccygaaggacatc

SEQ ID NO: 15976 - DNA, 21 bp, Homo sapiens
cctcttcataygcctgaatgc

SEQ ID NO: 15977 - DNA, 21 bp, Homo sapiens
gctctcagcakatgtttctga

SEQ ID NO: 15978 - DNA, 21 bp, Homo sapiens
taaaagcataragccaataga

SEQ ID NO: 15979 - DNA, 21 bp, Homo sapiens
agaaaattcamtacctcaaac

SEQ ID NO: 15980 - DNA, 21 bp, Homo sapiens
ggtgaactgcrtgtgtgcaaa

SEQ ID NO: 15981 - DNA, 21 bp, Homo sapiens
acctgtgagcrtggagctctc

SEQ ID NO: 15982 - DNA, 21 bp, Homo sapiens
gagcagagtakctctgactgt

SEQ ID NO: 15983 - DNA, 21 bp, Homo sapiens
ctacacacacragcgcgtgta

SEQ ID NO: 15984 - DNA, 21 bp, Homo sapiens
cctgtcattcytcatcaggga

SEQ ID NO: 15985 - DNA, 21 bp, Homo sapiens
ctaacacattkctgttggtta

SEQ ID NO: 15986 - DNA, 21 bp, Homo sapiens
attatcatgaygttttgcttc

SEQ ID NO: 15987 - DNA, 21 bp, Homo sapiens
tcctattagcktgtgtaatta

SEQ ID NO: 15988 - DNA, 21 bp, Homo sapiens
tacggtgagcyttgcctgtgc

SEQ ID NO: 15989 - DNA, 21 bp, Homo sapiens
tcaacaagttkgcttatttga

SEQ ID NO: 15990 - DNA, 21 bp, Homo sapiens
gctttaaaacrttaacactcg

SEQ ID NO: 15991 - DNA, 21 bp, Homo sapiens
cttacgtgccrggccctgtga

SEQ ID NO: 15992 - DNA, 21 bp, Homo sapiens
cttcttgctgmattttttttt

SEQ ID NO: 15993 - DNA, 21 bp, Homo sapiens
aattcttctgyaaaggagatt

SEQ ID NO: 15994 - DNA, 21 bp, Homo sapiens
tgttactgctmttcaccaaag

SEQ ID NO: 15995 - DNA, 21 bp, Homo sapiens
gacaacacgcrgagtacacac

SEQ ID NO: 15996 - DNA, 21 bp, Homo sapiens
tcaggcaagcygtgcagccct

SEQ ID NO: 15997 - DNA, 21 bp, Homo sapiens
agaataaaacygtttgaaatt

SEQ ID NO: 15998 - DNA, 21 bp, Homo sapiens
taaatgttatmatatgtggcc

SEQ ID NO: 15999 - DNA, 21 bp, Homo sapiens
tgggtcattcrtcctacagag

SEQ ID NO: 16000 - DNA, 21 bp, Homo sapiens
ccgtgccatcygcatttatgg

SEQ ID NO: 16001 - DNA, 21 bp, Homo sapiens
tcgctctttcyttctcaggag

SEQ ID NO: 16002 - DNA, 21 bp, Homo sapiens
acgcttagagrgagagctgtt

SEQ ID NO: 16003 - DNA, 21 bp, Homo sapiens
aaacacatacrgcaaatccaa

SEQ ID NO: 16004 - DNA, 21 bp, Homo sapiens
agctacagaamtttaaggtat

SEQ ID NO: 16005 - DNA, 21 bp, Homo sapiens
gcataaccaaytgaagtccat

SEQ ID NO: 16006 - DNA, 21 bp, Homo sapiens
tggtgtcttcrggttggcaaa

SEQ ID NO: 16007 - DNA, 21 bp, Homo sapiens
ccatcaattgmgatcgtgtaa

SEQ ID NO: 16008 - DNA, 21 bp, Homo sapiens
aaaaaaaaaamcaacagaatg

SEQ ID NO: 16009 - DNA, 21 bp, Homo sapiens
tatgtgtatcrcagtactatt

SEQ ID NO: 16010 - DNA, 21 bp, Homo sapiens
cagtttataaragcaaaaaag

SEQ ID NO: 16011 - DNA, 21 bp, Homo sapiens
tctgggatggytgcttattgc

SEQ ID NO: 16012 - DNA, 21 bp, Homo sapiens
ggctggagagkgatcaaggac

SEQ ID NO: 16013 - DNA, 21 bp, Homo sapiens
gatcaaggacmctttgggatt

SEQ ID NO: 16014 - DNA, 21 bp, Homo sapiens
acacttagcarataactccca

SEQ ID NO: 16015 - DNA, 21 bp, Homo sapiens
tttaaaacttkgatccatttg

SEQ ID NO: 16016 - DNA, 21 bp, Homo sapiens
agtggtgactrtgactcttcc

SEQ ID NO: 16017 - DNA, 21 bp, Homo sapiens
gcttccctgtkaccccctaag

SEQ ID NO: 16018 - DNA, 21 bp, Homo sapiens
acctgtggtcyctgggcttcc

SEQ ID NO: 16019 - DNA, 21 bp, Homo sapiens
ctccggtgtayctgacagttt

SEQ ID NO: 16020 - DNA, 21 bp, Homo sapiens
gccctgcattmagtatgttgt

SEQ ID NO: 16021 - DNA, 21 bp, Homo sapiens
ggacattcccyggccaagtgt

SEQ ID NO: 16022 - DNA, 21 bp, Homo sapiens
gctttgagaayaatcttccca

SEQ ID NO: 16023 - DNA, 21 bp, Homo sapiens
agatttggctmtgaggctata

SEQ ID NO: 16024 - DNA, 21 bp, Homo sapiens
tgcgcttcccytaaccactga

SEQ ID NO: 16025 - DNA, 21 bp, Homo sapiens
aacaataatgyaataaaagag

SEQ ID NO: 16026 - DNA, 21 bp, Homo sapiens
ttcaatacatytctggtattc

SEQ ID NO: 16027 - DNA, 21 bp, Homo sapiens
aaggcactgaraaatgggcac

SEQ ID NO: 16028 - DNA, 21 bp, Homo sapiens
atgtggttggkgtccccctct

SEQ ID NO: 16029 - DNA, 21 bp, Homo sapiens
aagactagaayattagaaatt

SEQ ID NO: 16030 - DNA, 21 bp, Homo sapiens
ctgaagacatrggtgttctcc

SEQ ID NO: 16031 - DNA, 21 bp, Homo sapiens
ggcacagagayttactaactt

SEQ ID NO: 16032 - DNA, 21 bp, Homo sapiens
aaagggttatrtgttcacttc

SEQ ID NO: 16033 - DNA, 21 bp, Homo sapiens
ttcaaaatgamccatttcttc

SEQ ID NO: 16034 - DNA, 21 bp, Homo sapiens
catgggcaatragtcagaatg

SEQ ID NO: 16035 - DNA, 21 bp, Homo sapiens
ggggatagagrtttgggaatc

SEQ ID NO: 16036 - DNA, 21 bp, Homo sapiens
tttcttgaaaytttgatatat

SEQ ID NO: 16037 - DNA, 21 bp, Homo sapiens
tactattatakatccattact

SEQ ID NO: 16038 - DNA, 21 bp, Homo sapiens
ggtcagaatgmgatctatttg

SEQ ID NO: 16039 - DNA, 21 bp, Homo sapiens
ctcaacaactkccaaaccaaa

SEQ ID NO: 16040 - DNA, 21 bp, Homo sapiens
tcactagtttktgaggttatg

SEQ ID NO: 16041 - DNA, 21 bp, Homo sapiens
actggcttcartgtgtaagct

SEQ ID NO: 16042 - DNA, 21 bp, Homo sapiens
taggggcattyggctcccctt

SEQ ID NO: 16043 - DNA, 21 bp, Homo sapiens
gattcttccakgcaggtggaa

SEQ ID NO: 16044 - DNA, 21 bp, Homo sapiens
ctccttttacrtcttcttctt

SEQ ID NO: 16045 - DNA, 21 bp, Homo sapiens
acccaaagacmctctccttct

SEQ ID NO: 16046 - DNA, 21 bp, Homo sapiens
ctgtcgtatcyacgggggata

SEQ ID NO: 16047 - DNA, 21 bp, Homo sapiens
aaaactgccayagtttgtgta

SEQ ID NO: 16048 - DNA, 21 bp, Homo sapiens
cttcataaaaragaagcaatg

SEQ ID NO: 16049 - DNA, 21 bp, Homo sapiens
tcaagaatagygacttgtacc

SEQ ID NO: 16050 - DNA, 21 bp, Homo sapiens
ttcctactcayattcttggat

SEQ ID NO: 16051 - DNA, 21 bp, Homo sapiens
cttgtactcaygaataggtgt

SEQ ID NO: 16052 - DNA, 21 bp, Homo sapiens
gttgcacagayatagttccct

SEQ ID NO: 16053 - DNA, 21 bp, Homo sapiens
tggcgttcacyttcttggttc

SEQ ID NO: 16054 - DNA, 21 bp, Homo sapiens
ttcatctccaytgtgaaaatt

SEQ ID NO: 16055 - DNA, 21 bp, Homo sapiens
gacttcagaaktaaaattata

SEQ ID NO: 16056 - DNA, 21 bp, Homo sapiens
gatctggaaayatgtaaaaat

SEQ ID NO: 16057 - DNA, 21 bp, Homo sapiens
tagcccaaccmaatgttccac

SEQ ID NO: 16058 - DNA, 21 bp, Homo sapiens
ctccatatcckcaaaagcatt

SEQ ID NO: 16059 - DNA, 21 bp, Homo sapiens
cagataatagygctccacatg

SEQ ID NO: 16060 - DNA, 21 bp, Homo sapiens
ctctatcaggytactcaagag

SEQ ID NO: 16061 - DNA, 21 bp, Homo sapiens
gatgtctcagrtgagcccagt

SEQ ID NO: 16062 - DNA, 21 bp, Homo sapiens
acaaggaagtycatgagaaat

SEQ ID NO: 16063 - DNA, 21 bp, Homo sapiens
atcatcatttkttataatccc

SEQ ID NO: 16064 - DNA, 21 bp, Homo sapiens
ctctctcgtargcttgctaaa

SEQ ID NO: 16065 - DNA, 21 bp, Homo sapiens
gtgtgtgttgytcaaacgttg

SEQ ID NO: 16066 - DNA, 21 bp, Homo sapiens
cccccatccckacagccgcaa

SEQ ID NO: 16067 - DNA, 21 bp, Homo sapiens
tcctacgctgyagaatgttta

SEQ ID NO: 16068 - DNA, 21 bp, Homo sapiens
accaaattgargacagaaagt

SEQ ID NO: 16069 - DNA, 21 bp, Homo sapiens
aatatcatccrggcgattgct

SEQ ID NO: 16070 - DNA, 21 bp, Homo sapiens
aaaacctagcrgtgcacaaaa

SEQ ID NO: 16071 - DNA, 21 bp, Homo sapiens
tactgccttayactgaaaatg

SEQ ID NO: 16072 - DNA, 21 bp, Homo sapiens
tccagattccrgtgcttatag

SEQ ID NO: 16073 - DNA, 21 bp, Homo sapiens
gcactccctcyatatattttt

SEQ ID NO: 16074 - DNA, 21 bp, Homo sapiens
cccattcatcrccaagtccag

SEQ ID NO: 16075 - DNA, 21 bp, Homo sapiens
cactttgtacrtagctccaat

SEQ ID NO: 16076 - DNA, 21 bp, Homo sapiens
aagacgctacraaaaaactgt

SEQ ID NO: 16077 - DNA, 21 bp, Homo sapiens
tgggaataagrgaggagaaca

SEQ ID NO: 16078 - DNA, 21 bp, Homo sapiens
tgaaagttacygaggtcctcc

SEQ ID NO: 16079 - DNA, 21 bp, Homo sapiens
accataatacrtgacctatgt

SEQ ID NO: 16080 - DNA, 21 bp, Homo sapiens
cagtttacatygttcttctgg

SEQ ID NO: 16081 - DNA, 21 bp, Homo sapiens
gtttgagtgtkttgcctaagc

SEQ ID NO: 16082 - DNA, 21 bp, Homo sapiens
aaatctagagytccttttcca

SEQ ID NO: 16083 - DNA, 21 bp, Homo sapiens
atgtcaaaaaytatggatgtg

SEQ ID NO: 16084 - DNA, 21 bp, Homo sapiens
gaagatgttayttactatggg

SEQ ID NO: 16085 - DNA, 21 bp, Homo sapiens
cagaaccctaygatctttcta

SEQ ID NO: 16086 - DNA, 21 bp, Homo sapiens
ttctggcatcrtttttaatga

SEQ ID NO: 16087 - DNA, 21 bp, Homo sapiens
gtgtgactggyttatggccag

SEQ ID NO: 16088 - DNA, 21 bp, Homo sapiens
ggacaactttygggaaatatt

SEQ ID NO: 16089 - DNA, 21 bp, Homo sapiens
tttgatgctckgtctctagtt

SEQ ID NO: 16090 - DNA, 21 bp, Homo sapiens
ataatgataargtccagagaa

SEQ ID NO: 16091 - DNA, 21 bp, Homo sapiens
gttggtataaratgtccatga

SEQ ID NO: 16092 - DNA, 21 bp, Homo sapiens
tgttcattacrgtccattatc

SEQ ID NO: 16093 - DNA, 21 bp, Homo sapiens
attattagagrgaatttttgt

SEQ ID NO: 16094 - DNA, 21 bp, Homo sapiens
aatacaggccrttgttgtgtg

SEQ ID NO: 16095 - DNA, 21 bp, Homo sapiens
caaatctgaaratcaatttgt

SEQ ID NO: 16096 - DNA, 21 bp, Homo sapiens
tgctgacaagrcagtatacca

SEQ ID NO: 16097 - DNA, 21 bp, Homo sapiens
cttccatagtyacatgagatc

SEQ ID NO: 16098 - DNA, 21 bp, Homo sapiens
ttttattgttrttctttttgt

SEQ ID NO: 16099 - DNA, 21 bp, Homo sapiens
acattctgagkgtcctcaatc

SEQ ID NO: 16100 - DNA, 21 bp, Homo sapiens
tgtgacaaggyacaatgaatc

SEQ ID NO: 16101 - DNA, 21 bp, Homo sapiens
tttaacctaargtgtccacac

SEQ ID NO: 16102 - DNA, 21 bp, Homo sapiens
aagatatttaygcaaataata

SEQ ID NO: 16103 - DNA, 21 bp, Homo sapiens
tgtcttattcrtcttatgtca

SEQ ID NO: 16104 - DNA, 21 bp, Homo sapiens
ctcattccacrtgagtcatac

SEQ ID NO: 16105 - DNA, 21 bp, Homo sapiens
ctgttgggagkggggaatgag

SEQ ID NO: 16106 - DNA, 21 bp, Homo sapiens
ggagcagtgcrctggcagact

SEQ ID NO: 16107 - DNA, 21 bp, Homo sapiens
ccccactcccygtcccgtagt

SEQ ID NO: 16108 - DNA, 21 bp, Homo sapiens
taggatcacaratctaagcac

SEQ ID NO: 16109 - DNA, 21 bp, Homo sapiens
aatttctataygctttaaaac

SEQ ID NO: 16110 - DNA, 21 bp, Homo sapiens
acgggagatcrcaaaacggag

SEQ ID NO: 16111 - DNA, 21 bp, Homo sapiens
ggaagtgcccygtgcccacct

SEQ ID NO: 16112 - DNA, 21 bp, Homo sapiens
tgcttgtgggrctcttcattc

SEQ ID NO: 16113 - DNA, 21 bp, Homo sapiens
ccgtctcccartaaatcttgt

SEQ ID NO: 16114 - DNA, 21 bp, Homo sapiens
attgtaaaacrcaccaacgag

SEQ ID NO: 16115 - DNA, 21 bp, Homo sapiens
agggtccctcmggagattcag

SEQ ID NO: 16116 - DNA, 21 bp, Homo sapiens
ttaacacggtrcttgggacca

SEQ ID NO: 16117 - DNA, 21 bp, Homo sapiens
ttttggtaaakgaaactcaat

SEQ ID NO: 16118 - DNA, 21 bp, Homo sapiens
gacgtgcctcyatttcaagga

SEQ ID NO: 16119 - DNA, 21 bp, Homo sapiens
atttaatcccycagttctttt

SEQ ID NO: 16120 - DNA, 21 bp, Homo sapiens
ctgggagtcgraggagtgtgc

SEQ ID NO: 16121 - DNA, 21 bp, Homo sapiens
aattttgagakgacacaattt

SEQ ID NO: 16122 - DNA, 21 bp, Homo sapiens
ggactgtggaragcactgaat

SEQ ID NO: 16123 - DNA, 21 bp, Homo sapiens
ctgcttcccartgtggaaaat

SEQ ID NO: 16124 - DNA, 21 bp, Homo sapiens
ttgctctaatrtggaggactg

SEQ ID NO: 16125 - DNA, 21 bp, Homo sapiens
gtggtcacagmgtccccacct

SEQ ID NO: 16126 - DNA, 21 bp, Homo sapiens
ccaggcaaatyatgacaacac

SEQ ID NO: 16127 - DNA, 21 bp, Homo sapiens
cgtcttccagkaaggcagtga

SEQ ID NO: 16128 - DNA, 21 bp, Homo sapiens
ccatgtacccmccaggagcac

SEQ ID NO: 16129 - DNA, 21 bp, Homo sapiens
gggcgatagcrtttcccctgt

SEQ ID NO: 16130 - DNA, 21 bp, Homo sapiens
ttctgggctcmgatgattggg

SEQ ID NO: 16131 - DNA, 21 bp, Homo sapiens
gattgtgctcyttttattatt

SEQ ID NO: 16132 - DNA, 21 bp, Homo sapiens
aagtcccttargtgagtataa

SEQ ID NO: 16133 - DNA, 21 bp, Homo sapiens
aactttggtcycactttggct

SEQ ID NO: 16134 - DNA, 21 bp, Homo sapiens
tgatcctaggratgctcctta

SEQ ID NO: 16135 - DNA, 21 bp, Homo sapiens
atgaggctttyagcttttgtt

SEQ ID NO: 16136 - DNA, 21 bp, Homo sapiens
atgataatttyctttggtctg

SEQ ID NO: 16137 - DNA, 21 bp, Homo sapiens
ttccattaggmgtgccttcat

SEQ ID NO: 16138 - DNA, 21 bp, Homo sapiens
ctttgtgtccrtactaacctg

SEQ ID NO: 16139 - DNA, 21 bp, Homo sapiens
tctagtaataragacaaacaa

SEQ ID NO: 16140 - DNA, 21 bp, Homo sapiens
caatctttacrttgggatagg

SEQ ID NO: 16141 - DNA, 21 bp, Homo sapiens
ttgagaaagcrcggtatgtgt

SEQ ID NO: 16142 - DNA, 21 bp, Homo sapiens
tttgtcttctygagtcacagc

SEQ ID NO: 16143 - DNA, 21 bp, Homo sapiens
cccaaattgtrtgcatttcac

SEQ ID NO: 16144 - DNA, 21 bp, Homo sapiens
ggggaacaagycctaataaaa

SEQ ID NO: 16145 - DNA, 21 bp, Homo sapiens
gctagtaagtygtaagtgatg

SEQ ID NO: 16146 - DNA, 21 bp, Homo sapiens
tgaacctttcrttataatcat

SEQ ID NO: 16147 - DNA, 21 bp, Homo sapiens
agtacaaaagrtcatctgatg

SEQ ID NO: 16148 - DNA, 21 bp, Homo sapiens
cactagtatamtcaatcagtt

SEQ ID NO: 16149 - DNA, 21 bp, Homo sapiens
aggaacgaacygtgctcagtg

SEQ ID NO: 16150 - DNA, 21 bp, Homo sapiens
cactcccataytgttgcaact

SEQ ID NO: 16151 - DNA, 21 bp, Homo sapiens
aaaactacacrtaagaagagc

SEQ ID NO: 16152 - DNA, 21 bp, Homo sapiens
tactgaataaraagccaatga

SEQ ID NO: 16153 - DNA, 21 bp, Homo sapiens
ttagtctgatyaaaaaacata

SEQ ID NO: 16154 - DNA, 21 bp, Homo sapiens
aatttgaaaayggtgttttat

SEQ ID NO: 16155 - DNA, 21 bp, Homo sapiens
taaatatctgytaattttcgc

SEQ ID NO: 16156 - DNA, 21 bp, Homo sapiens
cttagattatraacacacccc

SEQ ID NO: 16157 - DNA, 21 bp, Homo sapiens
tttgtatattygtttactaaa

SEQ ID NO: 16158 - DNA, 21 bp, Homo sapiens
caatcaattaytgacttaaca

SEQ ID NO: 16159 - DNA, 21 bp, Homo sapiens
ttgatgcttayggaaaaaaag

SEQ ID NO: 16160 - DNA, 21 bp, Homo sapiens
ggtcatctctraagtggctag

SEQ ID NO: 16161 - DNA, 21 bp, Homo sapiens
taaactttagytttcacactg

SEQ ID NO: 16162 - DNA, 21 bp, Homo sapiens
tagagctgtcmgtctatccaa

SEQ ID NO: 16163 - DNA, 21 bp, Homo sapiens
agcctcacttkaaagcaccag

SEQ ID NO: 16164 - DNA, 21 bp, Homo sapiens
aaaatttccayaggttccatg

SEQ ID NO: 16165 - DNA, 21 bp, Homo sapiens
aggggagaaamacaggcagtg

SEQ ID NO: 16166 - DNA, 21 bp, Homo sapiens
tagaagaactytgtggcattt

SEQ ID NO: 16167 - DNA, 21 bp, Homo sapiens
aagtgtactgrggaatacaga

SEQ ID NO: 16168 - DNA, 21 bp, Homo sapiens
tatgatgctgyttggtgttta

SEQ ID NO: 16169 - DNA, 21 bp, Homo sapiens
aggtcaggggratactcttta

SEQ ID NO: 16170 - DNA, 21 bp, Homo sapiens
tatcaaaatcygaatgaacta

SEQ ID NO: 16171 - DNA, 21 bp, Homo sapiens
cttttgctgayaggtcattta

SEQ ID NO: 16172 - DNA, 21 bp, Homo sapiens
ccttgtaatayacgtgacatt

SEQ ID NO: 16173 - DNA, 21 bp, Homo sapiens
tcctccaaatktccatattac

SEQ ID NO: 16174 - DNA, 21 bp, Homo sapiens
ttgcctcaccrgatgtgttta

SEQ ID NO: 16175 - DNA, 21 bp, Homo sapiens
aaggtgcctaycctgctgcct

SEQ ID NO: 16176 - DNA, 21 bp, Homo sapiens
agtgtacactyatattatgtg

SEQ ID NO: 16177 - DNA, 21 bp, Homo sapiens
tcaagtatttygataatgcaa

SEQ ID NO: 16178 - DNA, 21 bp, Homo sapiens
cagttttaatyacttggtagt

SEQ ID NO: 16179 - DNA, 21 bp, Homo sapiens
ttaacttacakcttctatgtc

SEQ ID NO: 16180 - DNA, 21 bp, Homo sapiens
atgtgtagacyggcaaaggca

SEQ ID NO: 16181 - DNA, 21 bp, Homo sapiens
ctttcagtaaygagaccaaag

SEQ ID NO: 16182 - DNA, 21 bp, Homo sapiens
tggttgtggarcatatacatc

SEQ ID NO: 16183 - DNA, 21 bp, Homo sapiens
agcttagcttygaattatttc

SEQ ID NO: 16184 - DNA, 21 bp, Homo sapiens
cccttcatcarctgaggaaca

SEQ ID NO: 16185 - DNA, 21 bp, Homo sapiens
ggtactgttgrtaactctgga

SEQ ID NO: 16186 - DNA, 21 bp, Homo sapiens
tagaaatattygagataggtt

SEQ ID NO: 16187 - DNA, 21 bp, Homo sapiens
gcaaaatcaakgtaaggataa

SEQ ID NO: 16188 - DNA, 21 bp, Homo sapiens
ttattgtctcrctgctaagta

SEQ ID NO: 16189 - DNA, 21 bp, Homo sapiens
tgatattcacmgaacaccaat

SEQ ID NO: 16190 - DNA, 21 bp, Homo sapiens
actgacccttyaaattccata

SEQ ID NO: 16191 - DNA, 21 bp, Homo sapiens
ccactatcctyaggatctttc

SEQ ID NO: 16192 - DNA, 21 bp, Homo sapiens
aaaaaaataaygcttctatga

SEQ ID NO: 16193 - DNA, 21 bp, Homo sapiens
agaattatatyatcatttata

SEQ ID NO: 16194 - DNA, 21 bp, Homo sapiens
caagtttgtgrcacatttttt

SEQ ID NO: 16195 - DNA, 21 bp, Homo sapiens
tagatcaaccytaagtaaaag

SEQ ID NO: 16196 - DNA, 21 bp, Homo sapiens
tttccaaagcrtatttccaaa

SEQ ID NO: 16197 - DNA, 21 bp, Homo sapiens
acatggaaaakttgtggggct

SEQ ID NO: 16198 - DNA, 21 bp, Homo sapiens
gattttaagtrttgtctgtac

SEQ ID NO: 16199 - DNA, 21 bp, Homo sapiens
tccatttctargttgactaat

SEQ ID NO: 16200 - DNA, 21 bp, Homo sapiens
gtaaaattgtyccggcttgag

SEQ ID NO: 16201 - DNA, 21 bp, Homo sapiens
gctcctgtttyactaaggaaa

SEQ ID NO: 16202 - DNA, 21 bp, Homo sapiens
ttgaatgaccrtccagtgttt

SEQ ID NO: 16203 - DNA, 21 bp, Homo sapiens
ttcagaattamaatctttacc

SEQ ID NO: 16204 - DNA, 21 bp, Homo sapiens
aaattgcatckcactgtacac

SEQ ID NO: 16205 - DNA, 21 bp, Homo sapiens
aaggctcttgytggaaaccat

SEQ ID NO: 16206 - DNA, 21 bp, Homo sapiens
tattggtactrttaactgcca

SEQ ID NO: 16207 - DNA, 21 bp, Homo sapiens
cacttcccacygaacctgagc

SEQ ID NO: 16208 - DNA, 21 bp, Homo sapiens
ttttttttccrtttcctattc

SEQ ID NO: 16209 - DNA, 21 bp, Homo sapiens
tcctatttcaytggtctcttc

SEQ ID NO: 16210 - DNA, 21 bp, Homo sapiens
aggagcctctkcatactcctt

SEQ ID NO: 16211 - DNA, 21 bp, Homo sapiens
tctgtctttgraatacccaga

SEQ ID NO: 16212 - DNA, 21 bp, Homo sapiens
ttcagggaatrtcagcaaatg

SEQ ID NO: 16213 - DNA, 21 bp, Homo sapiens
aagaaaatagycttctgtgtt

SEQ ID NO: 16214 - DNA, 21 bp, Homo sapiens
cattataaccrcttcccaaag

SEQ ID NO: 16215 - DNA, 21 bp, Homo sapiens
tgttcgttctytcagaaaatt

SEQ ID NO: 16216 - DNA, 21 bp, Homo sapiens
aggtgtccatrattttggctg

SEQ ID NO: 16217 - DNA, 21 bp, Homo sapiens
aatggcgtcayacaaaaaaga

SEQ ID NO: 16218 - DNA, 21 bp, Homo sapiens
tctacagattrgttgtttgga

SEQ ID NO: 16219 - DNA, 21 bp, Homo sapiens
gaactttggakaatgcattgt

SEQ ID NO: 16220 - DNA, 21 bp, Homo sapiens
gaagagatttrtttgtatcac

SEQ ID NO: 16221 - DNA, 21 bp, Homo sapiens
gtggtgaattyagtccacata

SEQ ID NO: 16222 - DNA, 21 bp, Homo sapiens
tgtatttgacyagtggccatt

SEQ ID NO: 16223 - DNA, 21 bp, Homo sapiens
cttgctctatrgtacacttgg

SEQ ID NO: 16224 - DNA, 21 bp, Homo sapiens
acagtgtttcrgagaacacat

SEQ ID NO: 16225 - DNA, 21 bp, Homo sapiens
acttgtgagtrtcattgaggt

SEQ ID NO: 16226 - DNA, 21 bp, Homo sapiens
gacttttagartgttcctact

SEQ ID NO: 16227 - DNA, 21 bp, Homo sapiens
ctagttcctcytttttttcac

SEQ ID NO: 16228 - DNA, 21 bp, Homo sapiens
aacaatgcgarcatctgagat

SEQ ID NO: 16229 - DNA, 21 bp, Homo sapiens
caaaccgagtktatgaatggt

SEQ ID NO: 16230 - DNA, 21 bp, Homo sapiens
aagctttccarataaaaccaa

SEQ ID NO: 16231 - DNA, 21 bp, Homo sapiens
ctaatttgcckgagtaccagg

SEQ ID NO: 16232 - DNA, 21 bp, Homo sapiens
ggaaccctacraggtctactg

SEQ ID NO: 16233 - DNA, 21 bp, Homo sapiens
tagttatttgratagtctggt

SEQ ID NO: 16234 - DNA, 21 bp, Homo sapiens
aataccccctyttcacctaca

SEQ ID NO: 16235 - DNA, 21 bp, Homo sapiens
tgagacttgcygcagacatcc

SEQ ID NO: 16236 - DNA, 21 bp, Homo sapiens
ccccttaaaakatccttggta

SEQ ID NO: 16237 - DNA, 21 bp, Homo sapiens
ccatgtagacrgagacaggag

SEQ ID NO: 16238 - DNA, 21 bp, Homo sapiens
aaagcaatacrgcccagctct

SEQ ID NO: 16239 - DNA, 21 bp, Homo sapiens
gtattcccccmtgaagtctct

SEQ ID NO: 16240 - DNA, 21 bp, Homo sapiens
cctgagcaaaytcctgatgtt

SEQ ID NO: 16241 - DNA, 21 bp, Homo sapiens
ctgcctcaccrtgtcctcata

SEQ ID NO: 16242 - DNA, 21 bp, Homo sapiens
accctgattgyccaggaaccc

SEQ ID NO: 16243 - DNA, 21 bp, Homo sapiens
atgagttttaygtgtcagcta

SEQ ID NO: 16244 - DNA, 21 bp, Homo sapiens
aatgtatttamcactactgag

SEQ ID NO: 16245 - DNA, 21 bp, Homo sapiens
tgaattaccakctcaggtgtt

SEQ ID NO: 16246 - DNA, 21 bp, Homo sapiens
tctaaaatatyccccctggag

SEQ ID NO: 16247 - DNA, 21 bp, Homo sapiens
ctggggtctgygggtagcaaa

SEQ ID NO: 16248 - DNA, 21 bp, Homo sapiens
tacctgcaatkatcactttag

SEQ ID NO: 16249 - DNA, 21 bp, Homo sapiens
ttaagaggagygtgaggttag

SEQ ID NO: 16250 - DNA, 21 bp, Homo sapiens
tgatttcagayttaagtggta

SEQ ID NO: 16251 - DNA, 21 bp, Homo sapiens
tgttcatcttyccttaggtga

SEQ ID NO: 16252 - DNA, 21 bp, Homo sapiens
ctgagctgagrtatgaaatgc

SEQ ID NO: 16253 - DNA, 21 bp, Homo sapiens
aagtgggcacrgggaagacaa

SEQ ID NO: 16254 - DNA, 21 bp, Homo sapiens
agtctgcccakctttaggaag

SEQ ID NO: 16255 - DNA, 21 bp, Homo sapiens
catgatctaaygttgacactg

SEQ ID NO: 16256 - DNA, 21 bp, Homo sapiens
agatgggactrtccagtaacc

SEQ ID NO: 16257 - DNA, 21 bp, Homo sapiens
gtgtgacttcygcacatagtc

SEQ ID NO: 16258 - DNA, 21 bp, Homo sapiens
caagtcaccartgtgggggca

SEQ ID NO: 16259 - DNA, 21 bp, Homo sapiens
tgaagtgctgrgaacagcaga

SEQ ID NO: 16260 - DNA, 21 bp, Homo sapiens
ttcctctttgrgagaattgtc

SEQ ID NO: 16261 - DNA, 21 bp, Homo sapiens
gataatgttcratgacaaaca

SEQ ID NO: 16262 - DNA, 21 bp, Homo sapiens
cctatgtctcygagcacattc

SEQ ID NO: 16263 - DNA, 21 bp, Homo sapiens
gggaaatgccygaagactcac

SEQ ID NO: 16264 - DNA, 21 bp, Homo sapiens
aggtagagagragtgaatgca

SEQ ID NO: 16265 - DNA, 21 bp, Homo sapiens
agacatcagtycagagtctga

SEQ ID NO: 16266 - DNA, 21 bp, Homo sapiens
ctcaaaggtcmtgacggtatt

SEQ ID NO: 16267 - DNA, 21 bp, Homo sapiens
tgtatttgagrtgctggaacg

SEQ ID NO: 16268 - DNA, 21 bp, Homo sapiens
ttaggagtgtyggcagtatca

SEQ ID NO: 16269 - DNA, 21 bp, Homo sapiens
tgccccataarctagaccatt

SEQ ID NO: 16270 - DNA, 21 bp, Homo sapiens
aaaatggaaarcagtgtccag

SEQ ID NO: 16271 - DNA, 21 bp, Homo sapiens
catgtgacacrggaagacaat

SEQ ID NO: 16272 - DNA, 21 bp, Homo sapiens
gatgaaataaracaaccaatt

SEQ ID NO: 16273 - DNA, 21 bp, Homo sapiens
ttggaaaaaarttccatttgc

SEQ ID NO: 16274 - DNA, 21 bp, Homo sapiens
tcaaatatacrttgaatttga

SEQ ID NO: 16275 - DNA, 21 bp, Homo sapiens
atgagctgtcyattaccttgc

SEQ ID NO: 16276 - DNA, 21 bp, Homo sapiens
gagaaaaagarttgctgcctt

SEQ ID NO: 16277 - DNA, 21 bp, Homo sapiens
gctattcttgrtaggcaggcc

SEQ ID NO: 16278 - DNA, 21 bp, Homo sapiens
cacttgaagaragtccccaag

SEQ ID NO: 16279 - DNA, 21 bp, Homo sapiens
aatgaatgaaygatgcctgat

SEQ ID NO: 16280 - DNA, 21 bp, Homo sapiens
cctgagtttargtgacattat

SEQ ID NO: 16281 - DNA, 21 bp, Homo sapiens
agcatttttcrtaccctattt

SEQ ID NO: 16282 - DNA, 21 bp, Homo sapiens
gagaatgagayagtcaaggtc

SEQ ID NO: 16283 - DNA, 21 bp, Homo sapiens
cctaagaaacrcagacaatgc

SEQ ID NO: 16284 - DNA, 21 bp, Homo sapiens
gtggcataagyaacaaaccat

SEQ ID NO: 16285 - DNA, 21 bp, Homo sapiens
cacatttcacyaagccacacc

SEQ ID NO: 16286 - DNA, 21 bp, Homo sapiens
cgttttctgtrtcttttaccg

SEQ ID NO: 16287 - DNA, 21 bp, Homo sapiens
attttacaacrttatattcac

SEQ ID NO: 16288 - DNA, 21 bp, Homo sapiens
aaccctactgmaaattctcag

SEQ ID NO: 16289 - DNA, 21 bp, Homo sapiens
tccttagctcrtatgattctg

SEQ ID NO: 16290 - DNA, 21 bp, Homo sapiens
gcaaagcattyattgcattgt

SEQ ID NO: 16291 - DNA, 21 bp, Homo sapiens
tccttcaaaarcccataaaca

SEQ ID NO: 16292 - DNA, 21 bp, Homo sapiens
ttacttttagmctcacaaaga

SEQ ID NO: 16293 - DNA, 21 bp, Homo sapiens
gggagaaaatragaagggagg

SEQ ID NO: 16294 - DNA, 21 bp, Homo sapiens
ttttggctacrcttatgagga

SEQ ID NO: 16295 - DNA, 21 bp, Homo sapiens
gttttataaarttgtgtacca

SEQ ID NO: 16296 - DNA, 21 bp, Homo sapiens
gcagaatagcygactacattt

SEQ ID NO: 16297 - DNA, 21 bp, Homo sapiens
aactttgtttrttgtcctatt

SEQ ID NO: 16298 - DNA, 21 bp, Homo sapiens
tttggtccagkgttcccaatt

SEQ ID NO: 16299 - DNA, 21 bp, Homo sapiens
tcaccgctgargcatcatagt

SEQ ID NO: 16300 - DNA, 21 bp, Homo sapiens
aaattgaagamaacgataaaa

SEQ ID NO: 16301 - DNA, 21 bp, Homo sapiens
cgtgcatgaaragaagacagc

SEQ ID NO: 16302 - DNA, 21 bp, Homo sapiens
tgcttttcttkgacatttttc

SEQ ID NO: 16303 - DNA, 21 bp, Homo sapiens
atgaggtctgmgactaggcaa

SEQ ID NO: 16304 - DNA, 21 bp, Homo sapiens
ttactgctatmaatttctaaa

SEQ ID NO: 16305 - DNA, 21 bp, Homo sapiens
tcaattttctrggcatccttt

SEQ ID NO: 16306 - DNA, 21 bp, Homo sapiens
gagttagtgcrcctggcttat

SEQ ID NO: 16307 - DNA, 21 bp, Homo sapiens
ctttttctcayaggatggttc

SEQ ID NO: 16308 - DNA, 21 bp, Homo sapiens
gcttaatgtakttatgagata

SEQ ID NO: 16309 - DNA, 21 bp, Homo sapiens
agtttcctgaycaatatgtgc

SEQ ID NO: 16310 - DNA, 21 bp, Homo sapiens
tggttctggargtcagaagtt

SEQ ID NO: 16311 - DNA, 21 bp, Homo sapiens
ctcagcgtgtrttttttttct

SEQ ID NO: 16312 - DNA, 21 bp, Homo sapiens
acatatacacrtgctcatacc

SEQ ID NO: 16313 - DNA, 21 bp, Homo sapiens
tatttctagcrtactcttata

SEQ ID NO: 16314 - DNA, 21 bp, Homo sapiens
cttgcactcaycaagtcctgg

SEQ ID NO: 16315 - DNA, 21 bp, Homo sapiens
aactgtctcarcttttcttcc

SEQ ID NO: 16316 - DNA, 21 bp, Homo sapiens
atagactgccmatttttgcct

SEQ ID NO: 16317 - DNA, 21 bp, Homo sapiens
gtcaaagacaraggcattaac

SEQ ID NO: 16318 - DNA, 21 bp, Homo sapiens
tggtcagaagmtggaagatag

SEQ ID NO: 16319 - DNA, 21 bp, Homo sapiens
aaggaagttcrtctgcctcga

SEQ ID NO: 16320 - DNA, 21 bp, Homo sapiens
aggatggccayggatagaatt

SEQ ID NO: 16321 - DNA, 21 bp, Homo sapiens
acgtccttggmacttcactca

SEQ ID NO: 16322 - DNA, 21 bp, Homo sapiens
ggatcatcttycaaataaaca

SEQ ID NO: 16323 - DNA, 21 bp, Homo sapiens
agaggacaccygcagccttca

SEQ ID NO: 16324 - DNA, 21 bp, Homo sapiens
aaacagtttgkattgcttcca

SEQ ID NO: 16325 - DNA, 21 bp, Homo sapiens
acccttcacartctataatag

SEQ ID NO: 16326 - DNA, 21 bp, Homo sapiens
gtcctgtgtamctctacatca

SEQ ID NO: 16327 - DNA, 21 bp, Homo sapiens
acttgctgatrctctacattt

SEQ ID NO: 16328 - DNA, 21 bp, Homo sapiens
ggctaggtctyggatggtctg

SEQ ID NO: 16329 - DNA, 21 bp, Homo sapiens
gggtaactaaytgtgtcctat

SEQ ID NO: 16330 - DNA, 21 bp, Homo sapiens
tttttttcatytcactaagaa

SEQ ID NO: 16331 - DNA, 21 bp, Homo sapiens
ctaatactcakgggattatcc

SEQ ID NO: 16332 - DNA, 21 bp, Homo sapiens
aagaagtctaygggattgata

SEQ ID NO: 16333 - DNA, 21 bp, Homo sapiens
gacttcaagartaagcctgtt

SEQ ID NO: 16334 - DNA, 21 bp, Homo sapiens
gtgggccaccratactggatt

SEQ ID NO: 16335 - DNA, 21 bp, Homo sapiens
tagataaacarccaataatat

SEQ ID NO: 16336 - DNA, 21 bp, Homo sapiens
tggaaattggyaactgataca

SEQ ID NO: 16337 - DNA, 21 bp, Homo sapiens
ccttttatccrtttcagactc

SEQ ID NO: 16338 - DNA, 21 bp, Homo sapiens
gtgtgaggggycagcccaggc

SEQ ID NO: 16339 - DNA, 21 bp, Homo sapiens
tgaagttgccrtcttgcctcc

SEQ ID NO: 16340 - DNA, 21 bp, Homo sapiens
ggtacgtaaamctctctttag

SEQ ID NO: 16341 - DNA, 21 bp, Homo sapiens
tctatcatccragtaattgct

SEQ ID NO: 16342 - DNA, 21 bp, Homo sapiens
tgaaaatgagygagaagaaaa

SEQ ID NO: 16343 - DNA, 21 bp, Homo sapiens
tatgtacactmaaatgagtat

SEQ ID NO: 16344 - DNA, 21 bp, Homo sapiens
tgccaatccartccatgctgg

SEQ ID NO: 16345 - DNA, 21 bp, Homo sapiens
cagttcctccracattcttcc

SEQ ID NO: 16346 - DNA, 21 bp, Homo sapiens
actaaaatacrctctcccact

SEQ ID NO: 16347 - DNA, 21 bp, Homo sapiens
ggtccaacctyagccctgaac

SEQ ID NO: 16348 - DNA, 21 bp, Homo sapiens
caaatgtacamatctagaagg

SEQ ID NO: 16349 - DNA, 21 bp, Homo sapiens
cttctcaatcycagacataaa

SEQ ID NO: 16350 - DNA, 21 bp, Homo sapiens
tgaggacaacyggatgttaat

SEQ ID NO: 16351 - DNA, 21 bp, Homo sapiens
ctgtgctctcytggcctctga

SEQ ID NO: 16352 - DNA, 21 bp, Homo sapiens
agtagagggcraagataaatc

SEQ ID NO: 16353 - DNA, 21 bp, Homo sapiens
tttctcccaartaagtgacaa

SEQ ID NO: 16354 - DNA, 21 bp, Homo sapiens
ccactatctcrggctgggaac

SEQ ID NO: 16355 - DNA, 21 bp, Homo sapiens
ggcttttcagytgggaattta

SEQ ID NO: 16356 - DNA, 21 bp, Homo sapiens
acaaagagctrtcctcagtat

SEQ ID NO: 16357 - DNA, 21 bp, Homo sapiens
tggagaaaaaygggcaagtta

SEQ ID NO: 16358 - DNA, 21 bp, Homo sapiens
cccacaccagytatttgctct

SEQ ID NO: 16359 - DNA, 21 bp, Homo sapiens
cttacagtttrtaaagtactt

SEQ ID NO: 16360 - DNA, 21 bp, Homo sapiens
catgtttacayacaaactggg

SEQ ID NO: 16361 - DNA, 21 bp, Homo sapiens
agattatatgmtgttaattta

SEQ ID NO: 16362 - DNA, 21 bp, Homo sapiens
tgtcagtcaaygtttgaagcc

SEQ ID NO: 16363 - DNA, 21 bp, Homo sapiens
gaagggacccrgaagagttac

SEQ ID NO: 16364 - DNA, 21 bp, Homo sapiens
atccatagaamagaagtctta

SEQ ID NO: 16365 - DNA, 21 bp, Homo sapiens
gcagccaaatrtgttaggtac

SEQ ID NO: 16366 - DNA, 21 bp, Homo sapiens
aaaagaatgaygtttgctgat

SEQ ID NO: 16367 - DNA, 21 bp, Homo sapiens
aggaatctgtrtaccacagaa

SEQ ID NO: 16368 - DNA, 21 bp, Homo sapiens
tcaggaatcarttcttatcta

SEQ ID NO: 16369 - DNA, 21 bp, Homo sapiens
ttccattttgrtgagtggccc

SEQ ID NO: 16370 - DNA, 21 bp, Homo sapiens
tcagtcacttyctaccatgtc

SEQ ID NO: 16371 - DNA, 21 bp, Homo sapiens
tcctgtcctaygaaccaagag

SEQ ID NO: 16372 - DNA, 21 bp, Homo sapiens
tctggaaaacratcatggcta

SEQ ID NO: 16373 - DNA, 21 bp, Homo sapiens
aggcaattatrcaatgtggca

SEQ ID NO: 16374 - DNA, 21 bp, Homo sapiens
ctttttgtctrtacaataatc

SEQ ID NO: 16375 - DNA, 21 bp, Homo sapiens
ggttttagggyactgggggca

SEQ ID NO: 16376 - DNA, 21 bp, Homo sapiens
ttgggcagtaktaacagatta

SEQ ID NO: 16377 - DNA, 21 bp, Homo sapiens
aaagggaaaaygtcaaaatgt

SEQ ID NO: 16378 - DNA, 21 bp, Homo sapiens
caaagagaacmtccctgactc

SEQ ID NO: 16379 - DNA, 21 bp, Homo sapiens
agtacggatgrgaggagactt

SEQ ID NO: 16380 - DNA, 21 bp, Homo sapiens
gatattcatgycttaattccc

SEQ ID NO: 16381 - DNA, 21 bp, Homo sapiens
aagggttttgraaacagaact

SEQ ID NO: 16382 - DNA, 21 bp, Homo sapiens
tctagcttctrgaaatgtcct

SEQ ID NO: 16383 - DNA, 21 bp, Homo sapiens
gataaagagartgaagtaaag

SEQ ID NO: 16384 - DNA, 21 bp, Homo sapiens
ctgtttctackgtaagcaaaa

SEQ ID NO: 16385 - DNA, 21 bp, Homo sapiens
cataacaaatrtcaccaaagt

SEQ ID NO: 16386 - DNA, 21 bp, Homo sapiens
atgagtatgcrtcttaaggta

SEQ ID NO: 16387 - DNA, 21 bp, Homo sapiens
tcttgtcaaayccactcatcc

SEQ ID NO: 16388 - DNA, 21 bp, Homo sapiens
tgggtatgacyatccagtgct

SEQ ID NO: 16389 - DNA, 21 bp, Homo sapiens
ctttatccagktgaatccatt

SEQ ID NO: 16390 - DNA, 21 bp, Homo sapiens
tgtagccctarctcgtcttcc

SEQ ID NO: 16391 - DNA, 21 bp, Homo sapiens
tacctgacagrgaaggggctc

SEQ ID NO: 16392 - DNA, 21 bp, Homo sapiens
ttaagaaatayggtaggttga

SEQ ID NO: 16393 - DNA, 21 bp, Homo sapiens
cctctgccttyccatatgctg

SEQ ID NO: 16394 - DNA, 21 bp, Homo sapiens
tggactaaccyctgactatgt

SEQ ID NO: 16395 - DNA, 21 bp, Homo sapiens
atgcagcaaayattgactaaa

SEQ ID NO: 16396 - DNA, 21 bp, Homo sapiens
tctttttaccycgtacacaac

SEQ ID NO: 16397 - DNA, 21 bp, Homo sapiens
ttctgcatccyatttttatgc

SEQ ID NO: 16398 - DNA, 21 bp, Homo sapiens
gatggtcacgrtatgcataaa

SEQ ID NO: 16399 - DNA, 21 bp, Homo sapiens
aactctgcttrcaggaatcct

SEQ ID NO: 16400 - DNA, 21 bp, Homo sapiens
actataaaccrattacttggg

SEQ ID NO: 16401 - DNA, 21 bp, Homo sapiens
tgttaaagaayaaccggaagg

SEQ ID NO: 16402 - DNA, 21 bp, Homo sapiens
gtttcgttttrgaaattttct

SEQ ID NO: 16403 - DNA, 21 bp, Homo sapiens
tttaatagtamggagatttca

SEQ ID NO: 16404 - DNA, 21 bp, Homo sapiens
tttcctcttckggttagggtc

SEQ ID NO: 16405 - DNA, 21 bp, Homo sapiens
accaggacccracactgagat

SEQ ID NO: 16406 - DNA, 21 bp, Homo sapiens
tttatccatcyagccctcaag

SEQ ID NO: 16407 - DNA, 21 bp, Homo sapiens
atttcaccccyggaactcaca

SEQ ID NO: 16408 - DNA, 21 bp, Homo sapiens
tagaataattyatctccatct

SEQ ID NO: 16409 - DNA, 21 bp, Homo sapiens
attttatgatygtgtgtgtaa

SEQ ID NO: 16410 - DNA, 21 bp, Homo sapiens
ctcttcaggaygtgatgctag

SEQ ID NO: 16411 - DNA, 21 bp, Homo sapiens
ccaaacaaaaygccacttcag

SEQ ID NO: 16412 - DNA, 21 bp, Homo sapiens
aaaaaacaaarcaagactttt

SEQ ID NO: 16413 - DNA, 21 bp, Homo sapiens
aagccatccartatgcggtat

SEQ ID NO: 16414 - DNA, 21 bp, Homo sapiens
ctctggattcrttccttgcat

SEQ ID NO: 16415 - DNA, 21 bp, Homo sapiens
agtcactgaayccctccaaac

SEQ ID NO: 16416 - DNA, 21 bp, Homo sapiens
gatgacaaggktttgcttcct

SEQ ID NO: 16417 - DNA, 21 bp, Homo sapiens
ttttcagggayagatttcgtc

SEQ ID NO: 16418 - DNA, 21 bp, Homo sapiens
tgaagaagacrttgccagcct

SEQ ID NO: 16419 - DNA, 21 bp, Homo sapiens
tcatttggtgygttctgagaa

SEQ ID NO: 16420 - DNA, 21 bp, Homo sapiens
ggaatctaaaygtcacccagg

SEQ ID NO: 16421 - DNA, 21 bp, Homo sapiens
agggacaagaraaaacattcc

SEQ ID NO: 16422 - DNA, 21 bp, Homo sapiens
agatgatgtaytaccagccct

SEQ ID NO: 16423 - DNA, 21 bp, Homo sapiens
tgtagaggtamggagattcag

SEQ ID NO: 16424 - DNA, 21 bp, Homo sapiens
ccatgtccccrttctcatctg

SEQ ID NO: 16425 - DNA, 21 bp, Homo sapiens
ttattattgtratataactga

SEQ ID NO: 16426 - DNA, 21 bp, Homo sapiens
tttgatgtccycaaaacagtt

SEQ ID NO: 16427 - DNA, 21 bp, Homo sapiens
atgtgactgcygcacaccgct

SEQ ID NO: 16428 - DNA, 21 bp, Homo sapiens
gaatcttaagratgcgaggaa

SEQ ID NO: 16429 - DNA, 21 bp, Homo sapiens
taacgaattgraacaatcact

SEQ ID NO: 16430 - DNA, 21 bp, Homo sapiens
tattttctctytagctgcatc

SEQ ID NO: 16431 - DNA, 21 bp, Homo sapiens
actatgccccycaatgcccct

SEQ ID NO: 16432 - DNA, 21 bp, Homo sapiens
tgcatggatgragaacatctg

SEQ ID NO: 16433 - DNA, 21 bp, Homo sapiens
cttcaagttgrtgttgtatag

SEQ ID NO: 16434 - DNA, 21 bp, Homo sapiens
cagaaacccartggagaagga

SEQ ID NO: 16435 - DNA, 21 bp, Homo sapiens
tccccttattyctgtgttcct

SEQ ID NO: 16436 - DNA, 21 bp, Homo sapiens
tattggagaarctgtacatgc

SEQ ID NO: 16437 - DNA, 21 bp, Homo sapiens
ttcattcactyggaatcttag

SEQ ID NO: 16438 - DNA, 21 bp, Homo sapiens
tattacataaytgaaagaaga

SEQ ID NO: 16439 - DNA, 21 bp, Homo sapiens
aggaagtgacyggggctggtc

SEQ ID NO: 16440 - DNA, 21 bp, Homo sapiens
tcacgatggtrtcttaggtcc

SEQ ID NO: 16441 - DNA, 21 bp, Homo sapiens
tgttccaggcrtggggtcacc

SEQ ID NO: 16442 - DNA, 21 bp, Homo sapiens
ggaaatgcaarcacttcaatt

SEQ ID NO: 16443 - DNA, 21 bp, Homo sapiens
ggtgatacagrccagtgcctg

SEQ ID NO: 16444 - DNA, 21 bp, Homo sapiens
tggagacaggrggggagcttg

SEQ ID NO: 16445 - DNA, 21 bp, Homo sapiens
gcacactccaygtgtacctgt

SEQ ID NO: 16446 - DNA, 21 bp, Homo sapiens
atgctgcaacrtaatatctat

SEQ ID NO: 16447 - DNA, 21 bp, Homo sapiens
ggatatcacaytcaactaaca

SEQ ID NO: 16448 - DNA, 21 bp, Homo sapiens
atgaggccatygaaagttaag

SEQ ID NO: 16449 - DNA, 21 bp, Homo sapiens
ggaagtgtttrggtaaagatt

SEQ ID NO: 16450 - DNA, 21 bp, Homo sapiens
agccaattcakaagtgtgggg

SEQ ID NO: 16451 - DNA, 21 bp, Homo sapiens
cgcctgtcackctcccggagc

SEQ ID NO: 16452 - DNA, 21 bp, Homo sapiens
gggctccaagktaccacttcc

SEQ ID NO: 16453 - DNA, 21 bp, Homo sapiens
tacccaagagmaatgaaggca

SEQ ID NO: 16454 - DNA, 21 bp, Homo sapiens
tttaacttgayggtatatctt

SEQ ID NO: 16455 - DNA, 21 bp, Homo sapiens
caggatagagkgtctttgctc

SEQ ID NO: 16456 - DNA, 21 bp, Homo sapiens
ttgggctgaarggaaagagat

SEQ ID NO: 16457 - DNA, 21 bp, Homo sapiens
aggtagcccayagtataacga

SEQ ID NO: 16458 - DNA, 21 bp, Homo sapiens
agagctacttrtctagatcat

SEQ ID NO: 16459 - DNA, 21 bp, Homo sapiens
aggctttttcrgtaactttca

SEQ ID NO: 16460 - DNA, 21 bp, Homo sapiens
atgactcagarcaaaggaagc

SEQ ID NO: 16461 - DNA, 21 bp, Homo sapiens
cagaaaaacaygtacagctat

SEQ ID NO: 16462 - DNA, 21 bp, Homo sapiens
gcagttctcaytgtctcacct

SEQ ID NO: 16463 - DNA, 21 bp, Homo sapiens
aacttgaagtraagtgaaact

SEQ ID NO: 16464 - DNA, 21 bp, Homo sapiens
gaactgcattkgccttcatag

SEQ ID NO: 16465 - DNA, 21 bp, Homo sapiens
gctttcatcakaaagtggaaa

SEQ ID NO: 16466 - DNA, 21 bp, Homo sapiens
tgaactggacrctttactcac

SEQ ID NO: 16467 - DNA, 21 bp, Homo sapiens
cttccaaatgyagagctcaat

SEQ ID NO: 16468 - DNA, 21 bp, Homo sapiens
gaggtctagtycaagccagca

SEQ ID NO: 16469 - DNA, 21 bp, Homo sapiens
gacctgcacamaggtacacat

SEQ ID NO: 16470 - DNA, 21 bp, Homo sapiens
caatctgtgcytgaccgtgtg

SEQ ID NO: 16471 - DNA, 21 bp, Homo sapiens
agaggttctcyatgaaaaacc

SEQ ID NO: 16472 - DNA, 21 bp, Homo sapiens
aaaaccatttkttacagatta

SEQ ID NO: 16473 - DNA, 21 bp, Homo sapiens
ataatatggaytctagagtgt

SEQ ID NO: 16474 - DNA, 21 bp, Homo sapiens
ggctttggggmtttgtggctt

SEQ ID NO: 16475 - DNA, 21 bp, Homo sapiens
agtcacgcatrtaggtatgag

SEQ ID NO: 16476 - DNA, 21 bp, Homo sapiens
tagacaattcmtctaatcaat

SEQ ID NO: 16477 - DNA, 21 bp, Homo sapiens
atagtcctttragccaagaat

SEQ ID NO: 16478 - DNA, 21 bp, Homo sapiens
ttatgcgatcktgcttctgtt

SEQ ID NO: 16479 - DNA, 21 bp, Homo sapiens
ctttatcttayttgaatgaac

SEQ ID NO: 16480 - DNA, 21 bp, Homo sapiens
tagatagaaargaacgagagg

SEQ ID NO: 16481 - DNA, 21 bp, Homo sapiens
gtgtgacatakaataagttat

SEQ ID NO: 16482 - DNA, 21 bp, Homo sapiens
tgttcgagcartgtttagagt

SEQ ID NO: 16483 - DNA, 21 bp, Homo sapiens
aaaaaagctgragacagggag

SEQ ID NO: 16484 - DNA, 21 bp, Homo sapiens
ttacttaggarcagtgctctt

SEQ ID NO: 16485 - DNA, 21 bp, Homo sapiens
cctgtaccctktcttttatgt

SEQ ID NO: 16486 - DNA, 21 bp, Homo sapiens
tttagagaatygtcattctaa

SEQ ID NO: 16487 - DNA, 21 bp, Homo sapiens
atgtaactagygtgtgaatgc

SEQ ID NO: 16488 - DNA, 21 bp, Homo sapiens
catccactgtraagcaaggag

SEQ ID NO: 16489 - DNA, 21 bp, Homo sapiens
catgatgtacrtagtctgtct

SEQ ID NO: 16490 - DNA, 21 bp, Homo sapiens
gtaaaagtttktcaccagata

SEQ ID NO: 16491 - DNA, 21 bp, Homo sapiens
ataaaaatccrgctccttgat

SEQ ID NO: 16492 - DNA, 21 bp, Homo sapiens
aattacatacrctaattacca

SEQ ID NO: 16493 - DNA, 21 bp, Homo sapiens
agttagtgagmaacattatga

SEQ ID NO: 16494 - DNA, 21 bp, Homo sapiens
tccacacctcraaagaaaagc

SEQ ID NO: 16495 - DNA, 21 bp, Homo sapiens
cactcagtttycaaatgtaag

SEQ ID NO: 16496 - DNA, 21 bp, Homo sapiens
gagccatagtytgtaggtgga

SEQ ID NO: 16497 - DNA, 21 bp, Homo sapiens
cttagctatcrtgaccaggaa

SEQ ID NO: 16498 - DNA, 21 bp, Homo sapiens
atctgtcaaayagaatttcaa

SEQ ID NO: 16499 - DNA, 21 bp, Homo sapiens
aaagctgaccrtgttccagga

SEQ ID NO: 16500 - DNA, 21 bp, Homo sapiens
tgtgagatctktgtgctctcc

SEQ ID NO: 16501 - DNA, 21 bp, Homo sapiens
ttatgggaatyacccagcaac

SEQ ID NO: 16502 - DNA, 21 bp, Homo sapiens
atttttatccrtctactctca

SEQ ID NO: 16503 - DNA, 21 bp, Homo sapiens
ggcagaaggarcagtgagtgc

SEQ ID NO: 16504 - DNA, 21 bp, Homo sapiens
agctaggcacmgaagagactg

SEQ ID NO: 16505 - DNA, 21 bp, Homo sapiens
gtcttccatgycccgaggtcc

SEQ ID NO: 16506 - DNA, 21 bp, Homo sapiens
tagcagagaaygctggacgaa

SEQ ID NO: 16507 - DNA, 21 bp, Homo sapiens
cttgctactgyttttctgagt

SEQ ID NO: 16508 - DNA, 21 bp, Homo sapiens
ggcatgggagyccccaggaag

SEQ ID NO: 16509 - DNA, 21 bp, Homo sapiens
aaaggggagckaaggaggagg

SEQ ID NO: 16510 - DNA, 21 bp, Homo sapiens
acgtcctggaycctgagatgc

SEQ ID NO: 16511 - DNA, 21 bp, Homo sapiens
cccgggacacygtggggaagg

SEQ ID NO: 16512 - DNA, 21 bp, Homo sapiens
ctaaaacaggkctgagagcca

SEQ ID NO: 16513 - DNA, 21 bp, Homo sapiens
gtgtagctacrcagataaaag

SEQ ID NO: 16514 - DNA, 21 bp, Homo sapiens
tgccagacaargagcctaaga

SEQ ID NO: 16515 - DNA, 21 bp, Homo sapiens
ctagaccgggktgacgggtgt

SEQ ID NO: 16516 - DNA, 21 bp, Homo sapiens
gcatgcccttragaacatggc

SEQ ID NO: 16517 - DNA, 21 bp, Homo sapiens
caggcgtgggygatctgaagc

SEQ ID NO: 16518 - DNA, 21 bp, Homo sapiens
aagaccacccrgaaactagag

SEQ ID NO: 16519 - DNA, 21 bp, Homo sapiens
attatctttgytccacttgac

SEQ ID NO: 16520 - DNA, 21 bp, Homo sapiens
taaaaaaaaamcccacatgat

SEQ ID NO: 16521 - DNA, 21 bp, Homo sapiens
tatatgctgtytacaagagct

SEQ ID NO: 16522 - DNA, 21 bp, Homo sapiens
aaataggtcarattcctaaat

SEQ ID NO: 16523 - DNA, 21 bp, Homo sapiens
ggaggcaatcrgaaccttggg

SEQ ID NO: 16524 - DNA, 21 bp, Homo sapiens
tctcatagatrttagtcaatg

SEQ ID NO: 16525 - DNA, 21 bp, Homo sapiens
cccttccacayggcattcaac

SEQ ID NO: 16526 - DNA, 21 bp, Homo sapiens
caaacaaaatrttttaaaggt

SEQ ID NO: 16527 - DNA, 21 bp, Homo sapiens
attttcagggrctctggaaga

SEQ ID NO: 16528 - DNA, 21 bp, Homo sapiens
acaagaggtcrggaactttcc

SEQ ID NO: 16529 - DNA, 21 bp, Homo sapiens
tggcaggtctrtgtgggcact

SEQ ID NO: 16530 - DNA, 21 bp, Homo sapiens
agccctggcaygcaagctgtg

SEQ ID NO: 16531 - DNA, 21 bp, Homo sapiens
aagaggatggygtattagtct

SEQ ID NO: 16532 - DNA, 21 bp, Homo sapiens
catccgttgcratgccctgcc

SEQ ID NO: 16533 - DNA, 21 bp, Homo sapiens
cctgccgtctyacagccccac

SEQ ID NO: 16534 - DNA, 21 bp, Homo sapiens
gcagagaaggratatcaagtt

SEQ ID NO: 16535 - DNA, 21 bp, Homo sapiens
ccttgcagagygcatggcttc

SEQ ID NO: 16536 - DNA, 21 bp, Homo sapiens
agcctcgtgargggctggctc

SEQ ID NO: 16537 - DNA, 21 bp, Homo sapiens
gggcaggaacmagtgtggcag

SEQ ID NO: 16538 - DNA, 21 bp, Homo sapiens
tgatcacaacracgtggggac

SEQ ID NO: 16539 - DNA, 21 bp, Homo sapiens
gttacacgagrttggtcatga

SEQ ID NO: 16540 - DNA, 21 bp, Homo sapiens
tggaacattaycaggcttcct

SEQ ID NO: 16541 - DNA, 21 bp, Homo sapiens
gctgggtatayggatgtttgg

SEQ ID NO: 16542 - DNA, 21 bp, Homo sapiens
cctaaggagayggggttggac

SEQ ID NO: 16543 - DNA, 21 bp, Homo sapiens
ctctttgaaargctttagggg

SEQ ID NO: 16544 - DNA, 21 bp, Homo sapiens
ggtcagatccyttcttccagg

SEQ ID NO: 16545 - DNA, 21 bp, Homo sapiens
tggggccaccrgacagtcctt

SEQ ID NO: 16546 - DNA, 21 bp, Homo sapiens
tttaatcttcyttatacattg

SEQ ID NO: 16547 - DNA, 21 bp, Homo sapiens
tgcaagtcttytaactattgg

SEQ ID NO: 16548 - DNA, 21 bp, Homo sapiens
ttattatgcgyatagattctt

SEQ ID NO: 16549 - DNA, 21 bp, Homo sapiens
ataacttctarattaaatttg

SEQ ID NO: 16550 - DNA, 21 bp, Homo sapiens
gacatgtcaakttagagaacc

SEQ ID NO: 16551 - DNA, 21 bp, Homo sapiens
attagttcccktgctgtatac

SEQ ID NO: 16552 - DNA, 21 bp, Homo sapiens
cttactgttayagttcttttc

SEQ ID NO: 16553 - DNA, 21 bp, Homo sapiens
ctgcctgaggrattaagggaa

SEQ ID NO: 16554 - DNA, 21 bp, Homo sapiens
tttaagaacgraaatgaaaca

SEQ ID NO: 16555 - DNA, 21 bp, Homo sapiens
ttaaggtggcyacactttccc

SEQ ID NO: 16556 - DNA, 21 bp, Homo sapiens
gtgatcgtacrcccttttgct

SEQ ID NO: 16557 - DNA, 21 bp, Homo sapiens
cactcccgcayactgagggac

SEQ ID NO: 16558 - DNA, 21 bp, Homo sapiens
tggggtggagyggaggtggac

SEQ ID NO: 16559 - DNA, 21 bp, Homo sapiens
ccaggcaagartgcaaatgga

SEQ ID NO: 16560 - DNA, 21 bp, Homo sapiens
cacctaaaacycagctcccac

SEQ ID NO: 16561 - DNA, 21 bp, Homo sapiens
cggaaaagcargaggtgctgc

SEQ ID NO: 16562 - DNA, 21 bp, Homo sapiens
caccagtcttrtattttttca

SEQ ID NO: 16563 - DNA, 21 bp, Homo sapiens
atggaggtagrtgaaacaaga

SEQ ID NO: 16564 - DNA, 21 bp, Homo sapiens
gccatgcagcyggttagggct

SEQ ID NO: 16565 - DNA, 21 bp, Homo sapiens
aaactttcaayggcttccaag

SEQ ID NO: 16566 - DNA, 21 bp, Homo sapiens
atccaactacyatgtttactg

SEQ ID NO: 16567 - DNA, 21 bp, Homo sapiens
acttagtgatktaaaagaaca

SEQ ID NO: 16568 - DNA, 21 bp, Homo sapiens
gaaactgccakatcaagatat

SEQ ID NO: 16569 - DNA, 21 bp, Homo sapiens
ctaagcagtaytaagccaaga

SEQ ID NO: 16570 - DNA, 21 bp, Homo sapiens
agagttgaggyttcctttcag

SEQ ID NO: 16571 - DNA, 21 bp, Homo sapiens
tttgacaaatyagcaaaaatg

SEQ ID NO: 16572 - DNA, 21 bp, Homo sapiens
ttccagcttgyacatacataa

SEQ ID NO: 16573 - DNA, 21 bp, Homo sapiens
cagacattatrctagcagcta

SEQ ID NO: 16574 - DNA, 21 bp, Homo sapiens
tttctaattcraaacttggtg

SEQ ID NO: 16575 - DNA, 21 bp, Homo sapiens
cctttcatgayttgaaacata

SEQ ID NO: 16576 - DNA, 21 bp, Homo sapiens
atagtcccccygaatctgtga

SEQ ID NO: 16577 - DNA, 21 bp, Homo sapiens
caaataagtaygttgttatta

SEQ ID NO: 16578 - DNA, 21 bp, Homo sapiens
gatagccataygatacaactg

SEQ ID NO: 16579 - DNA, 21 bp, Homo sapiens
tatagcatttycccagtgtta

SEQ ID NO: 16580 - DNA, 21 bp, Homo sapiens
aacttgggccycctgggagtg

SEQ ID NO: 16581 - DNA, 21 bp, Homo sapiens
cttaactctgmccttatcttg

SEQ ID NO: 16582 - DNA, 21 bp, Homo sapiens
cactgtttgtrtaactaacct

SEQ ID NO: 16583 - DNA, 21 bp, Homo sapiens
atttgacttaytacccaaatg

SEQ ID NO: 16584 - DNA, 21 bp, Homo sapiens
tgtatatttakctagcaacaa

SEQ ID NO: 16585 - DNA, 21 bp, Homo sapiens
ttgcagtctayactttagtat

SEQ ID NO: 16586 - DNA, 21 bp, Homo sapiens
aagcaccatcktaaaagcttc

SEQ ID NO: 16587 - DNA, 21 bp, Homo sapiens
aatcaggttcyatatatttct

SEQ ID NO: 16588 - DNA, 21 bp, Homo sapiens
agacttagaaycatactttga

SEQ ID NO: 16589 - DNA, 21 bp, Homo sapiens
ctcctctgccrccctgggtga

SEQ ID NO: 16590 - DNA, 21 bp, Homo sapiens
taccttgcccrttcaaaatca

SEQ ID NO: 16591 - DNA, 21 bp, Homo sapiens
tcaaggttacmtgcttatttg

SEQ ID NO: 16592 - DNA, 21 bp, Homo sapiens
cagcctgaggrtaccctaatt

SEQ ID NO: 16593 - DNA, 21 bp, Homo sapiens
atgtcagttayggatttcatc

SEQ ID NO: 16594 - DNA, 21 bp, Homo sapiens
tgaaaatggaycatccccaga

SEQ ID NO: 16595 - DNA, 21 bp, Homo sapiens
ttgctatcttrtctcagggct

SEQ ID NO: 16596 - DNA, 21 bp, Homo sapiens
aataacgtcaygctgctgtgc

SEQ ID NO: 16597 - DNA, 21 bp, Homo sapiens
gaaagatgtgygagattttca

SEQ ID NO: 16598 - DNA, 21 bp, Homo sapiens
cagcctggccycccctgccct

SEQ ID NO: 16599 - DNA, 21 bp, Homo sapiens
aggatcaaaargaggggtgac

SEQ ID NO: 16600 - DNA, 21 bp, Homo sapiens
cacagcaagtrcacacggagt

SEQ ID NO: 16601 - DNA, 21 bp, Homo sapiens
ggtgtaccatkattattgttg

SEQ ID NO: 16602 - DNA, 21 bp, Homo sapiens
ccatatatgcrctcccctcac

SEQ ID NO: 16603 - DNA, 21 bp, Homo sapiens
ggaatatagtrgggttttatg

SEQ ID NO: 16604 - DNA, 21 bp, Homo sapiens
tgaaataaaargactgtaaat

SEQ ID NO: 16605 - DNA, 21 bp, Homo sapiens
ctgttgagcaygtgaaatata

SEQ ID NO: 16606 - DNA, 21 bp, Homo sapiens
ctgagacataycctgaggggc

SEQ ID NO: 16607 - DNA, 21 bp, Homo sapiens
gatgacagatyaattctagac

SEQ ID NO: 16608 - DNA, 21 bp, Homo sapiens
aacttctatgkgattgatgaa

SEQ ID NO: 16609 - DNA, 21 bp, Homo sapiens
aaacagatatycataagccat

SEQ ID NO: 16610 - DNA, 21 bp, Homo sapiens
aatactatacmtgaaaacgct

SEQ ID NO: 16611 - DNA, 21 bp, Homo sapiens
ataaagtactyggagataaag

SEQ ID NO: 16612 - DNA, 21 bp, Homo sapiens
gtaaacatacrctatggacct

SEQ ID NO: 16613 - DNA, 21 bp, Homo sapiens
tgtatatttakcacacatcag

SEQ ID NO: 16614 - DNA, 21 bp, Homo sapiens
aagatctctcrtagtactgga

SEQ ID NO: 16615 - DNA, 21 bp, Homo sapiens
agagttattgyagcgtcaaca

SEQ ID NO: 16616 - DNA, 21 bp, Homo sapiens
taaacagctgrttaatctttc

SEQ ID NO: 16617 - DNA, 21 bp, Homo sapiens
agtactaattyaacctaccat

SEQ ID NO: 16618 - DNA, 21 bp, Homo sapiens
taactctactytcaggttatt

SEQ ID NO: 16619 - DNA, 21 bp, Homo sapiens
atctttgttaytgtcaacagt

SEQ ID NO: 16620 - DNA, 21 bp, Homo sapiens
tgcaatttgaytgtaagctct

SEQ ID NO: 16621 - DNA, 21 bp, Homo sapiens
gtgatctatgyggataaaata

SEQ ID NO: 16622 - DNA, 21 bp, Homo sapiens
caaggtacagygttcaaagca

SEQ ID NO: 16623 - DNA, 21 bp, Homo sapiens
tctgtgccctraagagtggcc

SEQ ID NO: 16624 - DNA, 21 bp, Homo sapiens
ttctaccctaygaccactcta

SEQ ID NO: 16625 - DNA, 21 bp, Homo sapiens
tctaagcctcrggtgacaaga

SEQ ID NO: 16626 - DNA, 21 bp, Homo sapiens
agagcaataaracaatctgta

SEQ ID NO: 16627 - DNA, 21 bp, Homo sapiens
cacagagaccycaccttccct

SEQ ID NO: 16628 - DNA, 21 bp, Homo sapiens
gtatcgcaagkcccttacatg

SEQ ID NO: 16629 - DNA, 21 bp, Homo sapiens
taaacccctartggtggctct

SEQ ID NO: 16630 - DNA, 21 bp, Homo sapiens
gaaaaggctaytgctgtttgc

SEQ ID NO: 16631 - DNA, 21 bp, Homo sapiens
acaccctgtcrggcccaccat

SEQ ID NO: 16632 - DNA, 21 bp, Homo sapiens
taaggtttacrgtgttcagag

SEQ ID NO: 16633 - DNA, 21 bp, Homo sapiens
tcgccagggayggccgctctg

SEQ ID NO: 16634 - DNA, 21 bp, Homo sapiens
tcccttgtacrgtgtctggct

SEQ ID NO: 16635 - DNA, 21 bp, Homo sapiens
tcaatatgctyagcagggctt

SEQ ID NO: 16636 - DNA, 21 bp, Homo sapiens
aatggaggcamaaagatgtga

SEQ ID NO: 16637 - DNA, 21 bp, Homo sapiens
agcattatctyatttaatcca

SEQ ID NO: 16638 - DNA, 21 bp, Homo sapiens
cactaggaaargtacaggtaa

SEQ ID NO: 16639 - DNA, 21 bp, Homo sapiens
ctactttctgkgcttgtctga

SEQ ID NO: 16640 - DNA, 21 bp, Homo sapiens
gcaactatcayataacctata

SEQ ID NO: 16641 - DNA, 21 bp, Homo sapiens
tcatcccaccrtggccagcac

SEQ ID NO: 16642 - DNA, 21 bp, Homo sapiens
aagggtttgcrcagaagagag

SEQ ID NO: 16643 - DNA, 21 bp, Homo sapiens
ggtggtgtggycaatgggagt

SEQ ID NO: 16644 - DNA, 21 bp, Homo sapiens
gaggggataamctgggctctg

SEQ ID NO: 16645 - DNA, 21 bp, Homo sapiens
tggatgctctyagaggggaat

SEQ ID NO: 16646 - DNA, 21 bp, Homo sapiens
tgcctggcgtraggtcggcgc

SEQ ID NO: 16647 - DNA, 21 bp, Homo sapiens
ggttctctgcrgcgcctgagc

SEQ ID NO: 16648 - DNA, 21 bp, Homo sapiens
cctgccctccyggcccttttg

SEQ ID NO: 16649 - DNA, 21 bp, Homo sapiens
gactggttatyggaaggtgcg

SEQ ID NO: 16650 - DNA, 21 bp, Homo sapiens
cagaaagctcygtccacatca

SEQ ID NO: 16651 - DNA, 21 bp, Homo sapiens
gggaagaaagmtccgttatga

SEQ ID NO: 16652 - DNA, 21 bp, Homo sapiens
ctctgaccgtrtgatctcagt

SEQ ID NO: 16653 - DNA, 21 bp, Homo sapiens
gataataatayccacctccca

SEQ ID NO: 16654 - DNA, 21 bp, Homo sapiens
aacttcatcakcaacttagct

SEQ ID NO: 16655 - DNA, 21 bp, Homo sapiens
ctttgggagtytggatgaggg

SEQ ID NO: 16656 - DNA, 21 bp, Homo sapiens
ctgtggttcartatctctgga

SEQ ID NO: 16657 - DNA, 21 bp, Homo sapiens
gagtattcggygagggggaag

SEQ ID NO: 16658 - DNA, 21 bp, Homo sapiens
tgttaactccyagaaaaactg

SEQ ID NO: 16659 - DNA, 21 bp, Homo sapiens
agaggcaaagkcatatctaga

SEQ ID NO: 16660 - DNA, 21 bp, Homo sapiens
tgaactgagargtaaccagga

SEQ ID NO: 16661 - DNA, 21 bp, Homo sapiens
ccaatcttgaygacagccctt

SEQ ID NO: 16662 - DNA, 21 bp, Homo sapiens
tctgcgagttrggtaaattat

SEQ ID NO: 16663 - DNA, 21 bp, Homo sapiens
cttcttatgaycacctcgttt

SEQ ID NO: 16664 - DNA, 21 bp, Homo sapiens
aagtaggaatytgacaggcga

SEQ ID NO: 16665 - DNA, 21 bp, Homo sapiens
cccgcttgcgygcacttcctg

SEQ ID NO: 16666 - DNA, 21 bp, Homo sapiens
tctcaagaacratctgtgaaa

SEQ ID NO: 16667 - DNA, 21 bp, Homo sapiens
tgggcgatgcycacagaagtt

SEQ ID NO: 16668 - DNA, 21 bp, Homo sapiens
ccctactttaytgatgaaaaa

SEQ ID NO: 16669 - DNA, 21 bp, Homo sapiens
tggatgccacrtttacctcat

SEQ ID NO: 16670 - DNA, 21 bp, Homo sapiens
ataacaggggrccaagcaaga

SEQ ID NO: 16671 - DNA, 21 bp, Homo sapiens
tcactgagttyccaaaacaac

SEQ ID NO: 16672 - DNA, 21 bp, Homo sapiens
actgaccaacmagcatgtatc

SEQ ID NO: 16673 - DNA, 21 bp, Homo sapiens
gaaaaattaaygtaaccttct

SEQ ID NO: 16674 - DNA, 21 bp, Homo sapiens
ttcctcattakgttgttttga

SEQ ID NO: 16675 - DNA, 21 bp, Homo sapiens
ctccgatgtcraccgctcatt

SEQ ID NO: 16676 - DNA, 21 bp, Homo sapiens
ctacttttatktccaaaatga

SEQ ID NO: 16677 - DNA, 21 bp, Homo sapiens
gcacttactaygcattaactc

SEQ ID NO: 16678 - DNA, 21 bp, Homo sapiens
ttttttcccayaggcatgaac

SEQ ID NO: 16679 - DNA, 21 bp, Homo sapiens
cattattctcycaaatactta

SEQ ID NO: 16680 - DNA, 21 bp, Homo sapiens
gtggaatgttycagccatttt

SEQ ID NO: 16681 - DNA, 21 bp, Homo sapiens
ccgcctgcctkgccttggagg

SEQ ID NO: 16682 - DNA, 21 bp, Homo sapiens
caaccaaggtratagacacag

SEQ ID NO: 16683 - DNA, 21 bp, Homo sapiens
gtcctcgtatrtgtttgtttc

SEQ ID NO: 16684 - DNA, 21 bp, Homo sapiens
tgagagctgaygctacgactg

SEQ ID NO: 16685 - DNA, 21 bp, Homo sapiens
gctgaatgccrcccgaggcac

SEQ ID NO: 16686 - DNA, 21 bp, Homo sapiens
taagtaagaaygcaagggcaa

SEQ ID NO: 16687 - DNA, 21 bp, Homo sapiens
ggatgttctaygtaagcaata

SEQ ID NO: 16688 - DNA, 21 bp, Homo sapiens
gacagagtctyactctattgc

SEQ ID NO: 16689 - DNA, 21 bp, Homo sapiens
ggtgagtatayacacacacac

SEQ ID NO: 16690 - DNA, 21 bp, Homo sapiens
gaaagctacayaggaaataat

SEQ ID NO: 16691 - DNA, 21 bp, Homo sapiens
tttgaacctgyactttccaca

SEQ ID NO: 16692 - DNA, 21 bp, Homo sapiens
tgaaattttayttctcatttg

SEQ ID NO: 16693 - DNA, 21 bp, Homo sapiens
ccttactgagyatgggggatg

SEQ ID NO: 16694 - DNA, 21 bp, Homo sapiens
tttgaagtaarctgctgtgtt

SEQ ID NO: 16695 - DNA, 21 bp, Homo sapiens
tcttagcagtrtttgtcttct

SEQ ID NO: 16696 - DNA, 21 bp, Homo sapiens
gtttgctgctrtgttgttgct

SEQ ID NO: 16697 - DNA, 21 bp, Homo sapiens
ttttgtgatcrtagacctaag

SEQ ID NO: 16698 - DNA, 21 bp, Homo sapiens
atttctcaacrtttaattttt

SEQ ID NO: 16699 - DNA, 21 bp, Homo sapiens
ggcaggtaaayaattctcccc

SEQ ID NO: 16700 - DNA, 21 bp, Homo sapiens
tcacagtatgrtatgttagag

SEQ ID NO: 16701 - DNA, 21 bp, Homo sapiens
ttctctgtgargttgaacagg

SEQ ID NO: 16702 - DNA, 21 bp, Homo sapiens
tctacagaatrttcctctgct

SEQ ID NO: 16703 - DNA, 21 bp, Homo sapiens
taaaaaatttygaaacacctt

SEQ ID NO: 16704 - DNA, 21 bp, Homo sapiens
gcttagaagarctgagagaca

SEQ ID NO: 16705 - DNA, 21 bp, Homo sapiens
cgtaatcttaratctctgctt

SEQ ID NO: 16706 - DNA, 21 bp, Homo sapiens
ttatcacagcrctgtgggcaa

SEQ ID NO: 16707 - DNA, 21 bp, Homo sapiens
tgttgcatgtytttatcataa

SEQ ID NO: 16708 - DNA, 21 bp, Homo sapiens
ggaattcacayagttaaacaa

SEQ ID NO: 16709 - DNA, 21 bp, Homo sapiens
tgatcatctcragaaattgga

SEQ ID NO: 16710 - DNA, 21 bp, Homo sapiens
ttcttgacccrcacaaactgt

SEQ ID NO: 16711 - DNA, 21 bp, Homo sapiens
acacacacttmcttctttctg

SEQ ID NO: 16712 - DNA, 21 bp, Homo sapiens
atattcggtckaattactatc

SEQ ID NO: 16713 - DNA, 21 bp, Homo sapiens
aatttctcacrtttgtcttgc

SEQ ID NO: 16714 - DNA, 21 bp, Homo sapiens
taggctcccaycacttagaaa

SEQ ID NO: 16715 - DNA, 21 bp, Homo sapiens
aactaagcatyggttttagaa

SEQ ID NO: 16716 - DNA, 21 bp, Homo sapiens
caggaaccacrtgtgtggaga

SEQ ID NO: 16717 - DNA, 21 bp, Homo sapiens
tctctaaccayagtagaattc

SEQ ID NO: 16718 - DNA, 21 bp, Homo sapiens
gctattaatayatgctcatga

SEQ ID NO: 16719 - DNA, 21 bp, Homo sapiens
atgtttttacrtgtagccaat

SEQ ID NO: 16720 - DNA, 21 bp, Homo sapiens
ttctcccgtcrtcccagcact

SEQ ID NO: 16721 - DNA, 21 bp, Homo sapiens
ggaacttagcmtctggttaga

SEQ ID NO: 16722 - DNA, 21 bp, Homo sapiens
gtggcattaartatacacata

SEQ ID NO: 16723 - DNA, 21 bp, Homo sapiens
ttccaaggaarccttgccctc

SEQ ID NO: 16724 - DNA, 21 bp, Homo sapiens
ggcagaggttyagcctggtac

SEQ ID NO: 16725 - DNA, 21 bp, Homo sapiens
actcctgtctratttatacag

SEQ ID NO: 16726 - DNA, 21 bp, Homo sapiens
cgaggcttttytcagccccca

SEQ ID NO: 16727 - DNA, 21 bp, Homo sapiens
acaagacaagrccagacattt

SEQ ID NO: 16728 - DNA, 21 bp, Homo sapiens
gatctggaaamtttgtaatgc

SEQ ID NO: 16729 - DNA, 21 bp, Homo sapiens
caaagcccctraattaaaaac

SEQ ID NO: 16730 - DNA, 21 bp, Homo sapiens
actccacataycggttgctga

SEQ ID NO: 16731 - DNA, 21 bp, Homo sapiens
tgagcaagggyctgagaggga

SEQ ID NO: 16732 - DNA, 21 bp, Homo sapiens
gcatagaaagrctgctcagtg

SEQ ID NO: 16733 - DNA, 21 bp, Homo sapiens
tgcttcctggygaaggacggt

SEQ ID NO: 16734 - DNA, 21 bp, Homo sapiens
catggccaacrtgcaggtctc

SEQ ID NO: 16735 - DNA, 21 bp, Homo sapiens
cctggcatgcrtaggtatttc

SEQ ID NO: 16736 - DNA, 21 bp, Homo sapiens
ctccgctctgytcccagcctg

SEQ ID NO: 16737 - DNA, 21 bp, Homo sapiens
tgttcccatayaaaacaagcc

SEQ ID NO: 16738 - DNA, 21 bp, Homo sapiens
cagggaaaaaytgttctgctc

SEQ ID NO: 16739 - DNA, 21 bp, Homo sapiens
actagggccaytttgaatcag

SEQ ID NO: 16740 - DNA, 21 bp, Homo sapiens
cattaccaaaygcagtgcatc

SEQ ID NO: 16741 - DNA, 21 bp, Homo sapiens
tttcagataaygtaattaaat

SEQ ID NO: 16742 - DNA, 21 bp, Homo sapiens
cagtggcaggragcatgacag

SEQ ID NO: 16743 - DNA, 21 bp, Homo sapiens
attagaagtcktttattttat

SEQ ID NO: 16744 - DNA, 21 bp, Homo sapiens
atttctctatmtctattgtta

SEQ ID NO: 16745 - DNA, 21 bp, Homo sapiens
ggagtttcagmcttgttcagt

SEQ ID NO: 16746 - DNA, 21 bp, Homo sapiens
aaacttctagraaatcatttc

SEQ ID NO: 16747 - DNA, 21 bp, Homo sapiens
ttgtcttctcyttaaattatc

SEQ ID NO: 16748 - DNA, 21 bp, Homo sapiens
cgaaaaaaaarctcacaagaa

SEQ ID NO: 16749 - DNA, 21 bp, Homo sapiens
ttttcatgccyatctaggttc

SEQ ID NO: 16750 - DNA, 21 bp, Homo sapiens
ttggctaattkttatcataat

SEQ ID NO: 16751 - DNA, 21 bp, Homo sapiens
tacactgaacygtgttatgca

SEQ ID NO: 16752 - DNA, 21 bp, Homo sapiens
agtattttagrcaggactagg

SEQ ID NO: 16753 - DNA, 21 bp, Homo sapiens
tggtcatcctkgtgcattttg

SEQ ID NO: 16754 - DNA, 21 bp, Homo sapiens
caactgatgtycatcaattgt

SEQ ID NO: 16755 - DNA, 21 bp, Homo sapiens
ttatacaaatrtgaatgaatg

SEQ ID NO: 16756 - DNA, 21 bp, Homo sapiens
tatgctacatrgctaatggaa

SEQ ID NO: 16757 - DNA, 21 bp, Homo sapiens
gcctatacctmatattttgct

SEQ ID NO: 16758 - DNA, 21 bp, Homo sapiens
tgaccttattrgatagtgata

SEQ ID NO: 16759 - DNA, 21 bp, Homo sapiens
gaccctttagygtcagtcact

SEQ ID NO: 16760 - DNA, 21 bp, Homo sapiens
ggaagtgttayttgaagtgac

SEQ ID NO: 16761 - DNA, 21 bp, Homo sapiens
gcaagaactcmtaaatattgt

SEQ ID NO: 16762 - DNA, 21 bp, Homo sapiens
tattttgatgyatatttacaa

SEQ ID NO: 16763 - DNA, 21 bp, Homo sapiens
aataactctayttaattccgg

SEQ ID NO: 16764 - DNA, 21 bp, Homo sapiens
aagacatcttrttctatgggt

SEQ ID NO: 16765 - DNA, 21 bp, Homo sapiens
cttctcgaggytgtgctagtg

SEQ ID NO: 16766 - DNA, 21 bp, Homo sapiens
taacactgacrtaatccagtg

SEQ ID NO: 16767 - DNA, 21 bp, Homo sapiens
aactgatattyccaaagtcca

SEQ ID NO: 16768 - DNA, 21 bp, Homo sapiens
taaattaaacktgatagactc

SEQ ID NO: 16769 - DNA, 21 bp, Homo sapiens
ctagaaagcartcagtttgga

SEQ ID NO: 16770 - DNA, 21 bp, Homo sapiens
ggcaaattcamacttctgctg

SEQ ID NO: 16771 - DNA, 21 bp, Homo sapiens
caaaggaaaayggaagtctga

SEQ ID NO: 16772 - DNA, 21 bp, Homo sapiens
ataaatgctayggcggaaaca

SEQ ID NO: 16773 - DNA, 21 bp, Homo sapiens
atgcagagagrgaagaatgcc

SEQ ID NO: 16774 - DNA, 21 bp, Homo sapiens
cttttctgccyctccctattt

SEQ ID NO: 16775 - DNA, 21 bp, Homo sapiens
tctttgaagcygagatagagc

SEQ ID NO: 16776 - DNA, 21 bp, Homo sapiens
ctttgggttaytgagcgtcac

SEQ ID NO: 16777 - DNA, 21 bp, Homo sapiens
tacagctaaamtgtattgagt

SEQ ID NO: 16778 - DNA, 21 bp, Homo sapiens
tgacctctctrctgactagga

SEQ ID NO: 16779 - DNA, 21 bp, Homo sapiens
ctaaatagtgyccagataggt

SEQ ID NO: 16780 - DNA, 21 bp, Homo sapiens
gaatgattatraataaaaggg

SEQ ID NO: 16781 - DNA, 21 bp, Homo sapiens
acacttttagygagctaaaat

SEQ ID NO: 16782 - DNA, 21 bp, Homo sapiens
gccaataaaamtatagtcagt

SEQ ID NO: 16783 - DNA, 21 bp, Homo sapiens
gtgttatctgrtatttagcat

SEQ ID NO: 16784 - DNA, 21 bp, Homo sapiens
tagccaatgayaggttataca

SEQ ID NO: 16785 - DNA, 21 bp, Homo sapiens
ctccaatcccracatgtaggt

SEQ ID NO: 16786 - DNA, 21 bp, Homo sapiens
aaaagtaatgmgtactcagga

SEQ ID NO: 16787 - DNA, 21 bp, Homo sapiens
ttataaaatarggatgaatat

SEQ ID NO: 16788 - DNA, 21 bp, Homo sapiens
ggataaagcgycttaaagctt

SEQ ID NO: 16789 - DNA, 21 bp, Homo sapiens
tacacacaccygcttttcttc

SEQ ID NO: 16790 - DNA, 21 bp, Homo sapiens
tgcctgtaacytctgcacctt

SEQ ID NO: 16791 - DNA, 21 bp, Homo sapiens
aaaaaaaaatmtgatgctagt

SEQ ID NO: 16792 - DNA, 21 bp, Homo sapiens
taactaactcrtgaatcactc

SEQ ID NO: 16793 - DNA, 21 bp, Homo sapiens
agatgggcctrggccttttgc

SEQ ID NO: 16794 - DNA, 21 bp, Homo sapiens
actaggaaagyccatttgcat

SEQ ID NO: 16795 - DNA, 21 bp, Homo sapiens
taattacatgycccttaacat

SEQ ID NO: 16796 - DNA, 21 bp, Homo sapiens
cctccctgtayataggatata

SEQ ID NO: 16797 - DNA, 21 bp, Homo sapiens
aggagattgaygccttttttt

SEQ ID NO: 16798 - DNA, 21 bp, Homo sapiens
cccagcctaaycacttaccac

SEQ ID NO: 16799 - DNA, 21 bp, Homo sapiens
cccctcggcayggccttactt

SEQ ID NO: 16800 - DNA, 21 bp, Homo sapiens
taataaatctrttgcccagtc

SEQ ID NO: 16801 - DNA, 21 bp, Homo sapiens
tttatcctttyagggtagcaa

SEQ ID NO: 16802 - DNA, 21 bp, Homo sapiens
taaaatacctrtgtacccagt

SEQ ID NO: 16803 - DNA, 21 bp, Homo sapiens
aagataatcarccctagactt

SEQ ID NO: 16804 - DNA, 21 bp, Homo sapiens
cctctctttcrgttctcccac

SEQ ID NO: 16805 - DNA, 21 bp, Homo sapiens
ctacacgcttmacctggggct

SEQ ID NO: 16806 - DNA, 21 bp, Homo sapiens
ctgcacagtgyttttcttggg

SEQ ID NO: 16807 - DNA, 21 bp, Homo sapiens
cggaagaggtyaagggtcact

SEQ ID NO: 16808 - DNA, 21 bp, Homo sapiens
attgggaatgygcaggcctgt

SEQ ID NO: 16809 - DNA, 21 bp, Homo sapiens
agccctcgctyggggagccca

SEQ ID NO: 16810 - DNA, 21 bp, Homo sapiens
tgacctagaayaagagtaaac

SEQ ID NO: 16811 - DNA, 21 bp, Homo sapiens
ataattttgcrcaagttattc

SEQ ID NO: 16812 - DNA, 21 bp, Homo sapiens
tataagcaaamagcaagaact

SEQ ID NO: 16813 - DNA, 21 bp, Homo sapiens
cccaccctaaygcctcaccct

SEQ ID NO: 16814 - DNA, 21 bp, Homo sapiens
cctctccccayccccaaccac

SEQ ID NO: 16815 - DNA, 21 bp, Homo sapiens
atgtctatacrcaggagggtt

SEQ ID NO: 16816 - DNA, 21 bp, Homo sapiens
agtgttcaggktatagaaagt

SEQ ID NO: 16817 - DNA, 21 bp, Homo sapiens
taggcatccaratggcaagag

SEQ ID NO: 16818 - DNA, 21 bp, Homo sapiens
gaattaggagracagtgtcta

SEQ ID NO: 16819 - DNA, 21 bp, Homo sapiens
caccaccccargccacatgga

SEQ ID NO: 16820 - DNA, 21 bp, Homo sapiens
ggtccctcggkgtgaggtcga

SEQ ID NO: 16821 - DNA, 21 bp, Homo sapiens
ggcattccctyggacacaatc

SEQ ID NO: 16822 - DNA, 21 bp, Homo sapiens
agggaagactytcctgtggat

SEQ ID NO: 16823 - DNA, 21 bp, Homo sapiens
ctgtttctccrtctcagtcct

SEQ ID NO: 16824 - DNA, 21 bp, Homo sapiens
acggtgaaggkaaggggagaa

SEQ ID NO: 16825 - DNA, 21 bp, Homo sapiens
ctccccatctmcccccagtgc

SEQ ID NO: 16826 - DNA, 21 bp, Homo sapiens
gtacacttaamactggcaaat

SEQ ID NO: 16827 - DNA, 21 bp, Homo sapiens
tctcagccctygtacttttgc

SEQ ID NO: 16828 - DNA, 21 bp, Homo sapiens
atgtccagacycctcctatgc

SEQ ID NO: 16829 - DNA, 21 bp, Homo sapiens
catgttggggygtgtctcaga

SEQ ID NO: 16830 - DNA, 21 bp, Homo sapiens
atccttatttycattcttcct

SEQ ID NO: 16831 - DNA, 21 bp, Homo sapiens
gtagtacttayaaaagaactg

SEQ ID NO: 16832 - DNA, 21 bp, Homo sapiens
atcaccttctyccctctgaag

SEQ ID NO: 16833 - DNA, 21 bp, Homo sapiens
cgaaacgaaaygaaacaaaac

SEQ ID NO: 16834 - DNA, 21 bp, Homo sapiens
aaattaaacaygggcaatagg

SEQ ID NO: 16835 - DNA, 21 bp, Homo sapiens
gcccttgctargcaggtagga

SEQ ID NO: 16836 - DNA, 21 bp, Homo sapiens
gaaggtacccrtgtgtcaata

SEQ ID NO: 16837 - DNA, 21 bp, Homo sapiens
aggcaatccarttgggatgag

SEQ ID NO: 16838 - DNA, 21 bp, Homo sapiens
ctaagtctgtrtacaaccttt

SEQ ID NO: 16839 - DNA, 21 bp, Homo sapiens
aaccttagggmtttgttcttg

SEQ ID NO: 16840 - DNA, 21 bp, Homo sapiens
tcaacaggttraggcagtatt

SEQ ID NO: 16841 - DNA, 21 bp, Homo sapiens
gcacattttcmctgtccctca

SEQ ID NO: 16842 - DNA, 21 bp, Homo sapiens
caatataatgygatgcatgtg

SEQ ID NO: 16843 - DNA, 21 bp, Homo sapiens
actaggtactratgctcaaaa

SEQ ID NO: 16844 - DNA, 21 bp, Homo sapiens
gtggtctccayttagtaaact

SEQ ID NO: 16845 - DNA, 21 bp, Homo sapiens
aataatttatrgtagagtgaa

SEQ ID NO: 16846 - DNA, 21 bp, Homo sapiens
aaagctggtgyaagcaatcaa

SEQ ID NO: 16847 - DNA, 21 bp, Homo sapiens
tacaaagtggraaagagataa

SEQ ID NO: 16848 - DNA, 21 bp, Homo sapiens
tcgggggccaraacagtgtta

SEQ ID NO: 16849 - DNA, 21 bp, Homo sapiens
tcctgtacagyctacagaact

SEQ ID NO: 16850 - DNA, 21 bp, Homo sapiens
ttcatagatgyttatgttgat

SEQ ID NO: 16851 - DNA, 21 bp, Homo sapiens
aaatgtatttyctttttggta

SEQ ID NO: 16852 - DNA, 21 bp, Homo sapiens
gaaattcagaraaggagatgt

SEQ ID NO: 16853 - DNA, 21 bp, Homo sapiens
tagatatatcrtgtgaactaa

SEQ ID NO: 16854 - DNA, 21 bp, Homo sapiens
gctgactcaarccatggtgaa

SEQ ID NO: 16855 - DNA, 21 bp, Homo sapiens
gctatgtcttkcaagtaaaat

SEQ ID NO: 16856 - DNA, 21 bp, Homo sapiens
aaattacaggyggtagaacat

SEQ ID NO: 16857 - DNA, 21 bp, Homo sapiens
gtgaaaatttraaatgactta

SEQ ID NO: 16858 - DNA, 21 bp, Homo sapiens
cagagacagaygagtccataa

SEQ ID NO: 16859 - DNA, 21 bp, Homo sapiens
agtatatcacrtaaaggtgca

SEQ ID NO: 16860 - DNA, 21 bp, Homo sapiens
actctgacacycattaggatc

SEQ ID NO: 16861 - DNA, 21 bp, Homo sapiens
aactcattttyatttgcaatt

SEQ ID NO: 16862 - DNA, 21 bp, Homo sapiens
cagggggtagrggtgaaagtg

SEQ ID NO: 16863 - DNA, 21 bp, Homo sapiens
tatagaacctmcagtatgtca

SEQ ID NO: 16864 - DNA, 21 bp, Homo sapiens
agctccaaaarctttgtagaa

SEQ ID NO: 16865 - DNA, 21 bp, Homo sapiens
aattaaatggyagcattggat

SEQ ID NO: 16866 - DNA, 21 bp, Homo sapiens
actcatcttcrtacctaataa

SEQ ID NO: 16867 - DNA, 21 bp, Homo sapiens
atgtaataaayaataaaaaca

SEQ ID NO: 16868 - DNA, 21 bp, Homo sapiens
ccaagccatgygtaaataaag

SEQ ID NO: 16869 - DNA, 21 bp, Homo sapiens
aacatgtaaaygtccatggtg

SEQ ID NO: 16870 - DNA, 21 bp, Homo sapiens
ccaggattgtyaagaaacaat

SEQ ID NO: 16871 - DNA, 21 bp, Homo sapiens
cacagagtctkccagtaggcg

SEQ ID NO: 16872 - DNA, 21 bp, Homo sapiens
atgtgccaagrtcacagctga

SEQ ID NO: 16873 - DNA, 21 bp, Homo sapiens
gtagcctccarcaggtgaaat

SEQ ID NO: 16874 - DNA, 21 bp, Homo sapiens
agtaagacttyccttgatatt

SEQ ID NO: 16875 - DNA, 21 bp, Homo sapiens
tcaaatgtatkctgtatagta

SEQ ID NO: 16876 - DNA, 21 bp, Homo sapiens
acttgttcctragagcagagg

SEQ ID NO: 16877 - DNA, 21 bp, Homo sapiens
aggcaagaatragagatgatt

SEQ ID NO: 16878 - DNA, 21 bp, Homo sapiens
aaaggggcacytggagtctaa

SEQ ID NO: 16879 - DNA, 21 bp, Homo sapiens
gagtcctttayatatgtagcc

SEQ ID NO: 16880 - DNA, 21 bp, Homo sapiens
gtgaacagctyaccccaagga

SEQ ID NO: 16881 - DNA, 21 bp, Homo sapiens
acttcttgagycagtggatta

SEQ ID NO: 16882 - DNA, 21 bp, Homo sapiens
tattaagcccrtgactactca

SEQ ID NO: 16883 - DNA, 21 bp, Homo sapiens
agaaatttacrtatcatgttt

SEQ ID NO: 16884 - DNA, 21 bp, Homo sapiens
agtgtatgatrtacccttgcc

SEQ ID NO: 16885 - DNA, 21 bp, Homo sapiens
ggtttccatgyaccaataaaa

SEQ ID NO: 16886 - DNA, 21 bp, Homo sapiens
attgcaataayagcttagttg

SEQ ID NO: 16887 - DNA, 21 bp, Homo sapiens
tccaaaatgtrtaatgtgatt

SEQ ID NO: 16888 - DNA, 21 bp, Homo sapiens
tattcctaagyacttaggcac

SEQ ID NO: 16889 - DNA, 21 bp, Homo sapiens
aggttttttaraaagccttta

SEQ ID NO: 16890 - DNA, 21 bp, Homo sapiens
ttagaaatgarggctttgggc

SEQ ID NO: 16891 - DNA, 21 bp, Homo sapiens
agatccctgcrtccctctacg

SEQ ID NO: 16892 - DNA, 21 bp, Homo sapiens
atgctcttcamctctgcctga

SEQ ID NO: 16893 - DNA, 21 bp, Homo sapiens
gtgaccaggcrcccctcaccc

SEQ ID NO: 16894 - DNA, 21 bp, Homo sapiens
acctctggggrcactcaccgt

SEQ ID NO: 16895 - DNA, 21 bp, Homo sapiens
ttggtgtccayatattaaata

SEQ ID NO: 16896 - DNA, 21 bp, Homo sapiens
tataagatctrcatatcagaa

SEQ ID NO: 16897 - DNA, 21 bp, Homo sapiens
gacattccacmcagaaataca

SEQ ID NO: 16898 - DNA, 21 bp, Homo sapiens
tggatgatcayatgctgttag

SEQ ID NO: 16899 - DNA, 21 bp, Homo sapiens
aacatatatayagtagatact

SEQ ID NO: 16900 - DNA, 21 bp, Homo sapiens
gacacaaacakggatgaagcc

SEQ ID NO: 16901 - DNA, 21 bp, Homo sapiens
cttccatgtgyttcctgtcag

SEQ ID NO: 16902 - DNA, 21 bp, Homo sapiens
aagttcctctytgagccactt

SEQ ID NO: 16903 - DNA, 21 bp, Homo sapiens
gagatggagaygagattgagc

SEQ ID NO: 16904 - DNA, 21 bp, Homo sapiens
aagcgaacaayaagtttttat

SEQ ID NO: 16905 - DNA, 21 bp, Homo sapiens
tgatcagggtkggtgttaaca

SEQ ID NO: 16906 - DNA, 21 bp, Homo sapiens
gtctatttgayacaagaaaaa

SEQ ID NO: 16907 - DNA, 21 bp, Homo sapiens
gggaatcacargtaaattaaa

SEQ ID NO: 16908 - DNA, 21 bp, Homo sapiens
acattattctractgtgtcta

SEQ ID NO: 16909 - DNA, 21 bp, Homo sapiens
gcctgactgargcactcaagg

SEQ ID NO: 16910 - DNA, 21 bp, Homo sapiens
aataggcactrtattaagtac

SEQ ID NO: 16911 - DNA, 21 bp, Homo sapiens
ccacggagctrtaggtgatga

SEQ ID NO: 16912 - DNA, 21 bp, Homo sapiens
taccccattaraaagccagta

SEQ ID NO: 16913 - DNA, 21 bp, Homo sapiens
ggtgagaagtyttgttaactt

SEQ ID NO: 16914 - DNA, 21 bp, Homo sapiens
gcatgtaaagygtttggaata

SEQ ID NO: 16915 - DNA, 21 bp, Homo sapiens
gagcagattcygagttttcca

SEQ ID NO: 16916 - DNA, 21 bp, Homo sapiens
tcattatgggraggattaaat

SEQ ID NO: 16917 - DNA, 21 bp, Homo sapiens
gtgttcctcamctctgcagcc

SEQ ID NO: 16918 - DNA, 21 bp, Homo sapiens
aagaatttgcrcaaggtctca

SEQ ID NO: 16919 - DNA, 21 bp, Homo sapiens
ttattctccayctccctaaag

SEQ ID NO: 16920 - DNA, 21 bp, Homo sapiens
ttcctctgtcygttcgcacag

SEQ ID NO: 16921 - DNA, 21 bp, Homo sapiens
tgggttacacyatcatcacag

SEQ ID NO: 16922 - DNA, 21 bp, Homo sapiens
ccataatttcrggcttttggc

SEQ ID NO: 16923 - DNA, 21 bp, Homo sapiens
agaagtgggcrggcttcattt

SEQ ID NO: 16924 - DNA, 21 bp, Homo sapiens
tgaacatgggytcattgccac

SEQ ID NO: 16925 - DNA, 21 bp, Homo sapiens
accacagactracccagaaag

SEQ ID NO: 16926 - DNA, 21 bp, Homo sapiens
agggcaatgcmcaaggaagaa

SEQ ID NO: 16927 - DNA, 21 bp, Homo sapiens
atgtgattacrtatcattttt

SEQ ID NO: 16928 - DNA, 21 bp, Homo sapiens
tctttctccayaatgaccagg

SEQ ID NO: 16929 - DNA, 21 bp, Homo sapiens
acttaagttgrtattctaaag

SEQ ID NO: 16930 - DNA, 21 bp, Homo sapiens
actcataaccycaaggcagga

SEQ ID NO: 16931 - DNA, 21 bp, Homo sapiens
ctaggaagccmtcttaggtaa

SEQ ID NO: 16932 - DNA, 21 bp, Homo sapiens
agatatatatmacatttgacc

SEQ ID NO: 16933 - DNA, 21 bp, Homo sapiens
ttgcaaagtgyattatttaaa

SEQ ID NO: 16934 - DNA, 21 bp, Homo sapiens
acagctaggtrtggtggtgcg

SEQ ID NO: 16935 - DNA, 21 bp, Homo sapiens
aatatcacttycccagggtct

SEQ ID NO: 16936 - DNA, 21 bp, Homo sapiens
aaatgattgtyacaatcaaat

SEQ ID NO: 16937 - DNA, 21 bp, Homo sapiens
tgtaactctgycatgcaacat

SEQ ID NO: 16938 - DNA, 21 bp, Homo sapiens
ttcctctttgytggcgagttt

SEQ ID NO: 16939 - DNA, 21 bp, Homo sapiens
aagtgttttargtgcattgcc

SEQ ID NO: 16940 - DNA, 21 bp, Homo sapiens
cttatattctrtcagatacag

SEQ ID NO: 16941 - DNA, 21 bp, Homo sapiens
tggggttgggygagtcccagc

SEQ ID NO: 16942 - DNA, 21 bp, Homo sapiens
aagggaaaaaygtgaatttag

SEQ ID NO: 16943 - DNA, 21 bp, Homo sapiens
aaatcgtcttytgttctcatg

SEQ ID NO: 16944 - DNA, 21 bp, Homo sapiens
tacaaaactckatatgatcaa

SEQ ID NO: 16945 - DNA, 21 bp, Homo sapiens
aaatgacaaayatttgagtta

SEQ ID NO: 16946 - DNA, 21 bp, Homo sapiens
caagaaacaayggagactggc

SEQ ID NO: 16947 - DNA, 21 bp, Homo sapiens
aaaaatatatygaaatatatt

SEQ ID NO: 16948 - DNA, 21 bp, Homo sapiens
ataaatctgtkttgaaacaag

SEQ ID NO: 16949 - DNA, 21 bp, Homo sapiens
ttcttccaggrcagcacaaaa

SEQ ID NO: 16950 - DNA, 21 bp, Homo sapiens
tttggttttcratgttcctct

SEQ ID NO: 16951 - DNA, 21 bp, Homo sapiens
tttccatgtcragctacagtg

SEQ ID NO: 16952 - DNA, 21 bp, Homo sapiens
cttgaagggcygctgggggaa

SEQ ID NO: 16953 - DNA, 21 bp, Homo sapiens
cagtgcaaatrtattaaacct

SEQ ID NO: 16954 - DNA, 21 bp, Homo sapiens
ttgagacctartaacatcatg

SEQ ID NO: 16955 - DNA, 21 bp, Homo sapiens
aatgatcaaayctagggaaaa

SEQ ID NO: 16956 - DNA, 21 bp, Homo sapiens
ataacaacgaktatgtggttg

SEQ ID NO: 16957 - DNA, 21 bp, Homo sapiens
tgaagaaaacrtgggagaaca

SEQ ID NO: 16958 - DNA, 21 bp, Homo sapiens
tgaattatacracaactatat

SEQ ID NO: 16959 - DNA, 21 bp, Homo sapiens
gggggaacacrctggagctta

SEQ ID NO: 16960 - DNA, 21 bp, Homo sapiens
gttcttgtgcrgcctgacgat

SEQ ID NO: 16961 - DNA, 21 bp, Homo sapiens
ccctaccaggyagcttctagc

SEQ ID NO: 16962 - DNA, 21 bp, Homo sapiens
cttattatatrgacctttacc

SEQ ID NO: 16963 - DNA, 21 bp, Homo sapiens
atgtgccaagyacttggagca

SEQ ID NO: 16964 - DNA, 21 bp, Homo sapiens
aaaaggtatakagaaagcaaa

SEQ ID NO: 16965 - DNA, 21 bp, Homo sapiens
gagcggctgayccaccagctc

SEQ ID NO: 16966 - DNA, 21 bp, Homo sapiens
gaactgaaagkgagtgcacac

SEQ ID NO: 16967 - DNA, 21 bp, Homo sapiens
tttgggctgcrctgtgatttg

SEQ ID NO: 16968 - DNA, 21 bp, Homo sapiens
atgagctctgmcaccagccat

SEQ ID NO: 16969 - DNA, 21 bp, Homo sapiens
catggaaaacrcatctatctc

SEQ ID NO: 16970 - DNA, 21 bp, Homo sapiens
cctcaagaccrtcgcttaaag

SEQ ID NO: 16971 - DNA, 21 bp, Homo sapiens
ccagtccataktacacggtgc

SEQ ID NO: 16972 - DNA, 21 bp, Homo sapiens
caaaacatatyagacacggag

SEQ ID NO: 16973 - DNA, 21 bp, Homo sapiens
ttcaccccttyacttcttcat

SEQ ID NO: 16974 - DNA, 21 bp, Homo sapiens
gctccatgccrtggtcatgta

SEQ ID NO: 16975 - DNA, 21 bp, Homo sapiens
attaatatagrttgttttaaa

SEQ ID NO: 16976 - DNA, 21 bp, Homo sapiens
ctcaatccaaygagaatgtcc

SEQ ID NO: 16977 - DNA, 21 bp, Homo sapiens
ccaggtcaccrggtcactgca

SEQ ID NO: 16978 - DNA, 21 bp, Homo sapiens
ctcctgtgctygtttcctggg

SEQ ID NO: 16979 - DNA, 21 bp, Homo sapiens
ttggcctcccrgataggcttc

SEQ ID NO: 16980 - DNA, 21 bp, Homo sapiens
catggatggamcttgagagca

SEQ ID NO: 16981 - DNA, 21 bp, Homo sapiens
gggctacctaycaccttataa

SEQ ID NO: 16982 - DNA, 21 bp, Homo sapiens
acacacatgcrcatatatcca

SEQ ID NO: 16983 - DNA, 21 bp, Homo sapiens
gacttctctcygtttttatac

SEQ ID NO: 16984 - DNA, 21 bp, Homo sapiens
ttgcaattttytgttgagacc

SEQ ID NO: 16985 - DNA, 21 bp, Homo sapiens
aggcagtttcyattgcctgga

SEQ ID NO: 16986 - DNA, 21 bp, Homo sapiens
ccacagaaaaracagctgggt

SEQ ID NO: 16987 - DNA, 21 bp, Homo sapiens
tggttgatgayacagattatt

SEQ ID NO: 16988 - DNA, 21 bp, Homo sapiens
tgctacctgtyctagccacgc

SEQ ID NO: 16989 - DNA, 21 bp, Homo sapiens
ggtgctgcatygctgacgact

SEQ ID NO: 16990 - DNA, 21 bp, Homo sapiens
cgcgctctctkggggtctggg

SEQ ID NO: 16991 - DNA, 21 bp, Homo sapiens
aggtgtcgtcrgggttggttc

SEQ ID NO: 16992 - DNA, 21 bp, Homo sapiens
gctaagcgatrtgcaagcatc

SEQ ID NO: 16993 - DNA, 21 bp, Homo sapiens
tggactcagaytcagccccag

SEQ ID NO: 16994 - DNA, 21 bp, Homo sapiens
atatgcatttraggttcctgc

SEQ ID NO: 16995 - DNA, 21 bp, Homo sapiens
ctgaatctcartggattttcc

SEQ ID NO: 16996 - DNA, 21 bp, Homo sapiens
gaatatttatyatacagttcc

SEQ ID NO: 16997 - DNA, 21 bp, Homo sapiens
ttacaataaayctcagccttt

SEQ ID NO: 16998 - DNA, 21 bp, Homo sapiens
agtcctggagrccgccccatt

SEQ ID NO: 16999 - DNA, 21 bp, Homo sapiens
aatatgtcaaktattgataac

SEQ ID NO: 17000 - DNA, 21 bp, Homo sapiens
tacagtggctrcagttcatca

SEQ ID NO: 17001 - DNA, 21 bp, Homo sapiens
tgagttttacrtatcacgaga

SEQ ID NO: 17002 - DNA, 21 bp, Homo sapiens
agtgtttctcrtgtgctgcta

SEQ ID NO: 17003 - DNA, 21 bp, Homo sapiens
cgttacccacrttaccccttc

SEQ ID NO: 17004 - DNA, 21 bp, Homo sapiens
atacaggagakattgatgagg

SEQ ID NO: 17005 - DNA, 21 bp, Homo sapiens
tatgcgttagmtttagagggg

SEQ ID NO: 17006 - DNA, 21 bp, Homo sapiens
ctctgagctgragaccctcgg

SEQ ID NO: 17007 - DNA, 21 bp, Homo sapiens
atttatacacmagggaattgc

SEQ ID NO: 17008 - DNA, 21 bp, Homo sapiens
actgtggtacrgctcaggtga

SEQ ID NO: 17009 - DNA, 21 bp, Homo sapiens
ggtggggccarggtgaagggc

SEQ ID NO: 17010 - DNA, 21 bp, Homo sapiens
gtggtacagaytgggcatggc

SEQ ID NO: 17011 - DNA, 21 bp, Homo sapiens
tctctgtcacygtcagtttcc

SEQ ID NO: 17012 - DNA, 21 bp, Homo sapiens
ttacaacagcrcagacaactc

SEQ ID NO: 17013 - DNA, 21 bp, Homo sapiens
ggggacagagygggcagctcc

SEQ ID NO: 17014 - DNA, 21 bp, Homo sapiens
tggaggctgcytgtttcatac

SEQ ID NO: 17015 - DNA, 21 bp, Homo sapiens
acggctcacckggactcgggc

SEQ ID NO: 17016 - DNA, 21 bp, Homo sapiens
ggatcgttacrggttcctggt

SEQ ID NO: 17017 - DNA, 21 bp, Homo sapiens
tttaccactamagaacagtta

SEQ ID NO: 17018 - DNA, 21 bp, Homo sapiens
cacctgaccgratgcccacac

SEQ ID NO: 17019 - DNA, 21 bp, Homo sapiens
aatgaggttgygactgctaaa

SEQ ID NO: 17020 - DNA, 21 bp, Homo sapiens
tggcccagatrttgctgtgaa

SEQ ID NO: 17021 - DNA, 21 bp, Homo sapiens
catttaacagyatctgtgcta

SEQ ID NO: 17022 - DNA, 21 bp, Homo sapiens
accctaagccrgttttggttt

SEQ ID NO: 17023 - DNA, 21 bp, Homo sapiens
gtactgtgtgkgtccctgaat

SEQ ID NO: 17024 - DNA, 21 bp, Homo sapiens
gatgtacccakttggaaaccc

SEQ ID NO: 17025 - DNA, 21 bp, Homo sapiens
ttagataattkatgaagaact

SEQ ID NO: 17026 - DNA, 21 bp, Homo sapiens
ttcccttgcaycttctagtaa

SEQ ID NO: 17027 - DNA, 21 bp, Homo sapiens
cctacatatgmgctctggcca

SEQ ID NO: 17028 - DNA, 21 bp, Homo sapiens
tgagaaatttyggaggacaat

SEQ ID NO: 17029 - DNA, 21 bp, Homo sapiens
aagtgcctgcrctccccaact

SEQ ID NO: 17030 - DNA, 21 bp, Homo sapiens
gcaaaggtgtrttgtattttt

SEQ ID NO: 17031 - DNA, 21 bp, Homo sapiens
agacacccatycacccacaca

SEQ ID NO: 17032 - DNA, 21 bp, Homo sapiens
tcgtggctagktacccgtagt

SEQ ID NO: 17033 - DNA, 21 bp, Homo sapiens
cacgggccgtmgtttactgac

SEQ ID NO: 17034 - DNA, 21 bp, Homo sapiens
tgtggtcaccygcccccttcc

SEQ ID NO: 17035 - DNA, 21 bp, Homo sapiens
tctgttgatgracatttgggt

SEQ ID NO: 17036 - DNA, 21 bp, Homo sapiens
tttaagtccartgttccctta

SEQ ID NO: 17037 - DNA, 21 bp, Homo sapiens
aatcaggtacytttgctgcca

SEQ ID NO: 17038 - DNA, 21 bp, Homo sapiens
tgcgttaacaygtaatttagt

SEQ ID NO: 17039 - DNA, 21 bp, Homo sapiens
gaactcctgaktgattgcctc

SEQ ID NO: 17040 - DNA, 21 bp, Homo sapiens
tgctcttgtcrtcctaaggct

SEQ ID NO: 17041 - DNA, 21 bp, Homo sapiens
atctgcaaatyggtagaaatg

SEQ ID NO: 17042 - DNA, 21 bp, Homo sapiens
tggtgattacytaattttaat

SEQ ID NO: 17043 - DNA, 21 bp, Homo sapiens
agattattgcygagtgggcat

SEQ ID NO: 17044 - DNA, 21 bp, Homo sapiens
ccccctgactygctggtggac

SEQ ID NO: 17045 - DNA, 21 bp, Homo sapiens
ttgttctgaamcagtagtttt

SEQ ID NO: 17046 - DNA, 21 bp, Homo sapiens
cagggcctggyggtcatgcta

SEQ ID NO: 17047 - DNA, 21 bp, Homo sapiens
aacaaatgtgytgcatggagg

SEQ ID NO: 17048 - DNA, 21 bp, Homo sapiens
acgtagagatraggaaagcaa

SEQ ID NO: 17049 - DNA, 21 bp, Homo sapiens
acactaatgamggcagcacac

SEQ ID NO: 17050 - DNA, 21 bp, Homo sapiens
cccactaaccrtgacaggcag

SEQ ID NO: 17051 - DNA, 21 bp, Homo sapiens
gctgcttgccrctcggctaat

SEQ ID NO: 17052 - DNA, 21 bp, Homo sapiens
ggagaagggcraaagggatga

SEQ ID NO: 17053 - DNA, 21 bp, Homo sapiens
gtcactgagcrcaaggtgcat

SEQ ID NO: 17054 - DNA, 21 bp, Homo sapiens
cttctcagcaraaaggattca

SEQ ID NO: 17055 - DNA, 21 bp, Homo sapiens
aggaacattcyacccatgtca

SEQ ID NO: 17056 - DNA, 21 bp, Homo sapiens
acctgatcccraccagcaggg

SEQ ID NO: 17057 - DNA, 21 bp, Homo sapiens
gctctcattcyctcacttaac

SEQ ID NO: 17058 - DNA, 21 bp, Homo sapiens
cttcccattcytctttctaaa

SEQ ID NO: 17059 - DNA, 21 bp, Homo sapiens
cctacaggagygttcaggcca

SEQ ID NO: 17060 - DNA, 21 bp, Homo sapiens
tattatccacrtagtgtcctt

SEQ ID NO: 17061 - DNA, 21 bp, Homo sapiens
ttccgatccayaggaagaaga

SEQ ID NO: 17062 - DNA, 21 bp, Homo sapiens
agagcagcaaygagatatcac

SEQ ID NO: 17063 - DNA, 21 bp, Homo sapiens
tctattaagartggttaaata

SEQ ID NO: 17064 - DNA, 21 bp, Homo sapiens
taggacttcckgttttctgag

SEQ ID NO: 17065 - DNA, 21 bp, Homo sapiens
gctgggggggygtgatccctg

SEQ ID NO: 17066 - DNA, 21 bp, Homo sapiens
actgaagtgaytcagtctatg

SEQ ID NO: 17067 - DNA, 21 bp, Homo sapiens
aagttttctgrctgactatga

SEQ ID NO: 17068 - DNA, 21 bp, Homo sapiens
actgctccccrtgtaccactg

SEQ ID NO: 17069 - DNA, 21 bp, Homo sapiens
agttttgcttmagattggctc

SEQ ID NO: 17070 - DNA, 21 bp, Homo sapiens
tccaagatgaygaacacctcc

SEQ ID NO: 17071 - DNA, 21 bp, Homo sapiens
cagcaaggctmtttaacgttt

SEQ ID NO: 17072 - DNA, 21 bp, Homo sapiens
attagaacagycttaacaaag

SEQ ID NO: 17073 - DNA, 21 bp, Homo sapiens
tgagttttggyagtgcagttt

SEQ ID NO: 17074 - DNA, 21 bp, Homo sapiens
actcataaatyaaagtaatgg

SEQ ID NO: 17075 - DNA, 21 bp, Homo sapiens
tttttcagctytatattctta

SEQ ID NO: 17076 - DNA, 21 bp, Homo sapiens
aattgcaatgytagtcccagt

SEQ ID NO: 17077 - DNA, 21 bp, Homo sapiens
atggccaattkgttactggga

SEQ ID NO: 17078 - DNA, 21 bp, Homo sapiens
ataatgacaayccaacaaatt

SEQ ID NO: 17079 - DNA, 21 bp, Homo sapiens
caaaaatccartgcttcctat

SEQ ID NO: 17080 - DNA, 21 bp, Homo sapiens
tttcaggagayaaagttttat

SEQ ID NO: 17081 - DNA, 21 bp, Homo sapiens
tgtaagcttcrtaacaaagaa

SEQ ID NO: 17082 - DNA, 21 bp, Homo sapiens
tttgcataatraatggtatca

SEQ ID NO: 17083 - DNA, 21 bp, Homo sapiens
cacatacaatycataacatga

SEQ ID NO: 17084 - DNA, 21 bp, Homo sapiens
cagagaggtgrgattgttgct

SEQ ID NO: 17085 - DNA, 21 bp, Homo sapiens
gtaactaacamagagtaggta

SEQ ID NO: 17086 - DNA, 21 bp, Homo sapiens
cctgtgtggcraatttacagg

SEQ ID NO: 17087 - DNA, 21 bp, Homo sapiens
ctgtgcaaaamgatttcaaaa

SEQ ID NO: 17088 - DNA, 21 bp, Homo sapiens
cagttgttcamatttacaaat

SEQ ID NO: 17089 - DNA, 21 bp, Homo sapiens
tccttgagttmaaatcccttc

SEQ ID NO: 17090 - DNA, 21 bp, Homo sapiens
tagattcaatragccttcatt

SEQ ID NO: 17091 - DNA, 21 bp, Homo sapiens
ccaaaggcagmgtagaatgtt

SEQ ID NO: 17092 - DNA, 21 bp, Homo sapiens
cataggttgcyggctggcagc

SEQ ID NO: 17093 - DNA, 21 bp, Homo sapiens
attaacatcamaaattgactt

SEQ ID NO: 17094 - DNA, 21 bp, Homo sapiens
gccaaacacgygctcaaatgt

SEQ ID NO: 17095 - DNA, 21 bp, Homo sapiens
aaataattcamtaccgtgctg

SEQ ID NO: 17096 - DNA, 21 bp, Homo sapiens
aaggctcaagycagtgaccag

SEQ ID NO: 17097 - DNA, 21 bp, Homo sapiens
agagattataytctttagttg

SEQ ID NO: 17098 - DNA, 21 bp, Homo sapiens
gcacttaagayggagtgtata

SEQ ID NO: 17099 - DNA, 21 bp, Homo sapiens
gctcatgggcrcaatattccc

SEQ ID NO: 17100 - DNA, 21 bp, Homo sapiens
atgacatgacyaagtgattct

SEQ ID NO: 17101 - DNA, 21 bp, Homo sapiens
tttttttgtcyatagcttctt

SEQ ID NO: 17102 - DNA, 21 bp, Homo sapiens
ctttcacataygttggtggtt

SEQ ID NO: 17103 - DNA, 21 bp, Homo sapiens
ctccacacaamtaagaatggt

SEQ ID NO: 17104 - DNA, 21 bp, Homo sapiens
gatgtctactmcccatgtgat

SEQ ID NO: 17105 - DNA, 21 bp, Homo sapiens
tgatgattagrtagaaatgat

SEQ ID NO: 17106 - DNA, 21 bp, Homo sapiens
taggagaatayaatgataatg

SEQ ID NO: 17107 - DNA, 21 bp, Homo sapiens
aaagctaaagrtaaagtaaat

SEQ ID NO: 17108 - DNA, 21 bp, Homo sapiens
cattcacaatmgccaagacag

SEQ ID NO: 17109 - DNA, 21 bp, Homo sapiens
cctgatgattrcactttaaat

SEQ ID NO: 17110 - DNA, 21 bp, Homo sapiens
aggacttctartagactttgg

SEQ ID NO: 17111 - DNA, 21 bp, Homo sapiens
cctctttcagrtacttatatc

SEQ ID NO: 17112 - DNA, 21 bp, Homo sapiens
gagtagccctyttctacttag

SEQ ID NO: 17113 - DNA, 21 bp, Homo sapiens
aatcctaaaayaagaacttga

SEQ ID NO: 17114 - DNA, 21 bp, Homo sapiens
tgtgtcttctrtcctcctata

SEQ ID NO: 17115 - DNA, 21 bp, Homo sapiens
gttattttttmttttagtgtg

SEQ ID NO: 17116 - DNA, 21 bp, Homo sapiens
aaatactgatytcatagaagt

SEQ ID NO: 17117 - DNA, 21 bp, Homo sapiens
agggttgaaamtgcaaacaac

SEQ ID NO: 17118 - DNA, 21 bp, Homo sapiens
aggatgaatarcacaaattct

SEQ ID NO: 17119 - DNA, 21 bp, Homo sapiens
tttcatggggyaggctgataa

SEQ ID NO: 17120 - DNA, 21 bp, Homo sapiens
ttaatagcagytcctatcact

SEQ ID NO: 17121 - DNA, 21 bp, Homo sapiens
tttttctctamaatttgaggt

SEQ ID NO: 17122 - DNA, 21 bp, Homo sapiens
tagtgcttttycagaatgtca

SEQ ID NO: 17123 - DNA, 21 bp, Homo sapiens
aggcatttttygttggcaaga

SEQ ID NO: 17124 - DNA, 21 bp, Homo sapiens
attacaaagtyttattaatta

SEQ ID NO: 17125 - DNA, 21 bp, Homo sapiens
aagggtcacaracacttaaaa

SEQ ID NO: 17126 - DNA, 21 bp, Homo sapiens
tgtttctaggrtgagttatac

SEQ ID NO: 17127 - DNA, 21 bp, Homo sapiens
acaccataagrttgtaataat

SEQ ID NO: 17128 - DNA, 21 bp, Homo sapiens
agattaacagrgctcaggtaa

SEQ ID NO: 17129 - DNA, 21 bp, Homo sapiens
tggctctgttkaatcttgctt

SEQ ID NO: 17130 - DNA, 21 bp, Homo sapiens
agatgcaggtrtcagaggact

SEQ ID NO: 17131 - DNA, 21 bp, Homo sapiens
gaagtgatatrtattatgcat

SEQ ID NO: 17132 - DNA, 21 bp, Homo sapiens
agactgaatgytccccctggg

SEQ ID NO: 17133 - DNA, 21 bp, Homo sapiens
agatgcatcaraaagtcatct

SEQ ID NO: 17134 - DNA, 21 bp, Homo sapiens
cctactcttcratattacccc

SEQ ID NO: 17135 - DNA, 21 bp, Homo sapiens
aaccattatgkttcttccatt

SEQ ID NO: 17136 - DNA, 21 bp, Homo sapiens
aaaaatgttgrcactctttta

SEQ ID NO: 17137 - DNA, 21 bp, Homo sapiens
ctacctatctytttcagtccc

SEQ ID NO: 17138 - DNA, 21 bp, Homo sapiens
actcttaagcrtcagagcttc

SEQ ID NO: 17139 - DNA, 21 bp, Homo sapiens
atgatatgatrgaggaacaga

SEQ ID NO: 17140 - DNA, 21 bp, Homo sapiens
taaaatttcaracagtagttg

SEQ ID NO: 17141 - DNA, 21 bp, Homo sapiens
acaataaactyggtgacaagt

SEQ ID NO: 17142 - DNA, 21 bp, Homo sapiens
ggcattttagytatccttttt

SEQ ID NO: 17143 - DNA, 21 bp, Homo sapiens
atttacgcctytatatatctg

SEQ ID NO: 17144 - DNA, 21 bp, Homo sapiens
tctatcacttkatcttccata

SEQ ID NO: 17145 - DNA, 21 bp, Homo sapiens
attctgaaggrggagagcatg

SEQ ID NO: 17146 - DNA, 21 bp, Homo sapiens
gcacacacacrgaaagcagaa

SEQ ID NO: 17147 - DNA, 21 bp, Homo sapiens
taaaaatcaamatgattgctg

SEQ ID NO: 17148 - DNA, 21 bp, Homo sapiens
tgaatataggrtgttgttacc

SEQ ID NO: 17149 - DNA, 21 bp, Homo sapiens
gctggacctcraggaacctgc

SEQ ID NO: 17150 - DNA, 21 bp, Homo sapiens
aatgaaaggargaaacgcacg

SEQ ID NO: 17151 - DNA, 21 bp, Homo sapiens
aaaattatgtrccaattctca

SEQ ID NO: 17152 - DNA, 21 bp, Homo sapiens
aaaactgaggratgtgccata

SEQ ID NO: 17153 - DNA, 21 bp, Homo sapiens
gggaattacayggtgcatttt

SEQ ID NO: 17154 - DNA, 21 bp, Homo sapiens
aaggtcatatrggagaagaca

SEQ ID NO: 17155 - DNA, 21 bp, Homo sapiens
ctgtaatcatragaagtgaat

SEQ ID NO: 17156 - DNA, 21 bp, Homo sapiens
aacaagttaargattctgaag

SEQ ID NO: 17157 - DNA, 21 bp, Homo sapiens
gcctagacccyagtttcagga

SEQ ID NO: 17158 - DNA, 21 bp, Homo sapiens
cgatgattccrtcatatttcc

SEQ ID NO: 17159 - DNA, 21 bp, Homo sapiens
tgtgacaaccyagacattgct

SEQ ID NO: 17160 - DNA, 21 bp, Homo sapiens
tgtaactatcyctttggctta

SEQ ID NO: 17161 - DNA, 21 bp, Homo sapiens
ttagtgcaaartggccaccca

SEQ ID NO: 17162 - DNA, 21 bp, Homo sapiens
ttcctcaccartattctattt

SEQ ID NO: 17163 - DNA, 21 bp, Homo sapiens
tgacacaatakctctttaagg

SEQ ID NO: 17164 - DNA, 21 bp, Homo sapiens
acatagacccractgaagtta

SEQ ID NO: 17165 - DNA, 21 bp, Homo sapiens
gagtctcagtygaatattaga

SEQ ID NO: 17166 - DNA, 21 bp, Homo sapiens
gcgacctagtkgccttttaaa

SEQ ID NO: 17167 - DNA, 21 bp, Homo sapiens
cattttactgrgaagtcagag

SEQ ID NO: 17168 - DNA, 21 bp, Homo sapiens
tagtggcttaraaaaacatca

SEQ ID NO: 17169 - DNA, 21 bp, Homo sapiens
ggtctttgtcyttatcttcag

SEQ ID NO: 17170 - DNA, 21 bp, Homo sapiens
ggatgtgtttyagattattgg

SEQ ID NO: 17171 - DNA, 21 bp, Homo sapiens
tctgaagctckgttgggctca

SEQ ID NO: 17172 - DNA, 21 bp, Homo sapiens
ccttctgctcytccatgccca

SEQ ID NO: 17173 - DNA, 21 bp, Homo sapiens
ataatcacccrgtaataagaa

SEQ ID NO: 17174 - DNA, 21 bp, Homo sapiens
gaactaactcyagctaggata

SEQ ID NO: 17175 - DNA, 21 bp, Homo sapiens
aagatagggcragtgctattc

SEQ ID NO: 17176 - DNA, 21 bp, Homo sapiens
cttgtacaaakgtaacatttg

SEQ ID NO: 17177 - DNA, 21 bp, Homo sapiens
attcaaagcarcttggtggac

SEQ ID NO: 17178 - DNA, 21 bp, Homo sapiens
tccagggttartcagctaagc

SEQ ID NO: 17179 - DNA, 21 bp, Homo sapiens
ggtctaactcrtcaatagatg

SEQ ID NO: 17180 - DNA, 21 bp, Homo sapiens
ataagtggtartctgaaatta

SEQ ID NO: 17181 - DNA, 21 bp, Homo sapiens
aaaaggaagakaactttgagg

SEQ ID NO: 17182 - DNA, 21 bp, Homo sapiens
gggttaggcayacaggtttta

SEQ ID NO: 17183 - DNA, 21 bp, Homo sapiens
tacagctgccrtcaatgagat

SEQ ID NO: 17184 - DNA, 21 bp, Homo sapiens
acttataaacygtatgaaagc

SEQ ID NO: 17185 - DNA, 21 bp, Homo sapiens
aagcagctccytgatacatga

SEQ ID NO: 17186 - DNA, 21 bp, Homo sapiens
taagaagtatragaattcttt

SEQ ID NO: 17187 - DNA, 21 bp, Homo sapiens
gagagaaagartggggtggga

SEQ ID NO: 17188 - DNA, 21 bp, Homo sapiens
ttcaatatgcyggagattgta

SEQ ID NO: 17189 - DNA, 21 bp, Homo sapiens
ctttccttctrtcttgaaatg

SEQ ID NO: 17190 - DNA, 21 bp, Homo sapiens
cggagaatgartgttatgggc

SEQ ID NO: 17191 - DNA, 21 bp, Homo sapiens
atcatgtattrgtgttcaaga

SEQ ID NO: 17192 - DNA, 21 bp, Homo sapiens
taagcaatacyatatagaaaa

SEQ ID NO: 17193 - DNA, 21 bp, Homo sapiens
tgggggcataygctaggaaaa

SEQ ID NO: 17194 - DNA, 21 bp, Homo sapiens
gaatccttccrttgttgtaaa

SEQ ID NO: 17195 - DNA, 21 bp, Homo sapiens
taaggagaatrttttagcagt

SEQ ID NO: 17196 - DNA, 21 bp, Homo sapiens
tatctccactrttttgtatcc

SEQ ID NO: 17197 - DNA, 21 bp, Homo sapiens
tagcttatagyagggagtcat

SEQ ID NO: 17198 - DNA, 21 bp, Homo sapiens
ccccaggtgcrtggatataag

SEQ ID NO: 17199 - DNA, 21 bp, Homo sapiens
tataactctcrtacatattaa

SEQ ID NO: 17200 - DNA, 21 bp, Homo sapiens
tgttgttgaarcttgtccaca

SEQ ID NO: 17201 - DNA, 21 bp, Homo sapiens
aaatttttctratgtctggtt

SEQ ID NO: 17202 - DNA, 21 bp, Homo sapiens
agtcttctaarcatcaaacta

SEQ ID NO: 17203 - DNA, 21 bp, Homo sapiens
ccacactccaracaagaaaat

SEQ ID NO: 17204 - DNA, 21 bp, Homo sapiens
acccgaggtaytgatatacaa

SEQ ID NO: 17205 - DNA, 21 bp, Homo sapiens
atttagcttgmactttctttc

SEQ ID NO: 17206 - DNA, 21 bp, Homo sapiens
tttagcctagrtatagcttga

SEQ ID NO: 17207 - DNA, 21 bp, Homo sapiens
gaagaacttgrtacattgatt

SEQ ID NO: 17208 - DNA, 21 bp, Homo sapiens
gtggatgagamtttagactct

SEQ ID NO: 17209 - DNA, 21 bp, Homo sapiens
attgaaatttycagaagtgcc

SEQ ID NO: 17210 - DNA, 21 bp, Homo sapiens
ttcagcaaaakatagagagtg

SEQ ID NO: 17211 - DNA, 21 bp, Homo sapiens
aatactagaayttgcctaaag

SEQ ID NO: 17212 - DNA, 21 bp, Homo sapiens
attagaaatayagtatttacc

SEQ ID NO: 17213 - DNA, 21 bp, Homo sapiens
ttttagtatcygagttatact

SEQ ID NO: 17214 - DNA, 21 bp, Homo sapiens
tttgtttggtyttcaatacag

SEQ ID NO: 17215 - DNA, 21 bp, Homo sapiens
ctgatcttcayagtaaacact

SEQ ID NO: 17216 - DNA, 21 bp, Homo sapiens
tctttatcttyggggcagtat

SEQ ID NO: 17217 - DNA, 21 bp, Homo sapiens
caaacgcttargatgatgaaa

SEQ ID NO: 17218 - DNA, 21 bp, Homo sapiens
aacaacataaytgtatttcat

SEQ ID NO: 17219 - DNA, 21 bp, Homo sapiens
agctctgcctrttatgtaaca

SEQ ID NO: 17220 - DNA, 21 bp, Homo sapiens
ctaaccatacrtgaatccatt

SEQ ID NO: 17221 - DNA, 21 bp, Homo sapiens
gaaatagcatmtttggcttat

SEQ ID NO: 17222 - DNA, 21 bp, Homo sapiens
gagatctcccrctttctgtca

SEQ ID NO: 17223 - DNA, 21 bp, Homo sapiens
tgtattgccakagaagaaggc

SEQ ID NO: 17224 - DNA, 21 bp, Homo sapiens
gctatgagaayaagtattaac

SEQ ID NO: 17225 - DNA, 21 bp, Homo sapiens
aactcctgtgracaactctca

SEQ ID NO: 17226 - DNA, 21 bp, Homo sapiens
actcagatttkggagaaagag

SEQ ID NO: 17227 - DNA, 21 bp, Homo sapiens
tcatcttactrtgcaatagaa

SEQ ID NO: 17228 - DNA, 21 bp, Homo sapiens
tggtaaaactragaatatatt

SEQ ID NO: 17229 - DNA, 21 bp, Homo sapiens
tgagcttgaayttttaatgac

SEQ ID NO: 17230 - DNA, 21 bp, Homo sapiens
agaggattatrtcttgcagct

SEQ ID NO: 17231 - DNA, 21 bp, Homo sapiens
cactgtttctkataattcctt

SEQ ID NO: 17232 - DNA, 21 bp, Homo sapiens
tggcttattgrgagcttttca

SEQ ID NO: 17233 - DNA, 21 bp, Homo sapiens
agctcttccakgtactccgtg

SEQ ID NO: 17234 - DNA, 21 bp, Homo sapiens
aacagtgatckgagaagaagc

SEQ ID NO: 17235 - DNA, 21 bp, Homo sapiens
aaactatttaytggatttttc

SEQ ID NO: 17236 - DNA, 21 bp, Homo sapiens
aaaagctatcraatctttgcg

SEQ ID NO: 17237 - DNA, 21 bp, Homo sapiens
gcattcacttrgataaagaag

SEQ ID NO: 17238 - DNA, 21 bp, Homo sapiens
tgctagttctygtccaggtcc

SEQ ID NO: 17239 - DNA, 21 bp, Homo sapiens
aaggtggcctrttcatgacca

SEQ ID NO: 17240 - DNA, 21 bp, Homo sapiens
atcagataatytcaatgctct

SEQ ID NO: 17241 - DNA, 21 bp, Homo sapiens
ggcttctactragagtgctca

SEQ ID NO: 17242 - DNA, 21 bp, Homo sapiens
gaactgacgcrtgtaacttcc

SEQ ID NO: 17243 - DNA, 21 bp, Homo sapiens
aaaaaataacraggcataatg

SEQ ID NO: 17244 - DNA, 21 bp, Homo sapiens
agcccgggcgytggggacccc

SEQ ID NO: 17245 - DNA, 21 bp, Homo sapiens
aaaacacattmtttaagcaat

SEQ ID NO: 17246 - DNA, 21 bp, Homo sapiens
catttttacartgtaatgaga

SEQ ID NO: 17247 - DNA, 21 bp, Homo sapiens
gtccccttaaygcaaattctg

SEQ ID NO: 17248 - DNA, 21 bp, Homo sapiens
atcgagaaaarcactaggaga

SEQ ID NO: 17249 - DNA, 21 bp, Homo sapiens
gaatagttttygtaagagtat

SEQ ID NO: 17250 - DNA, 21 bp, Homo sapiens
ggagaaaatgkctatgaatta

SEQ ID NO: 17251 - DNA, 21 bp, Homo sapiens
tgattaatacrtagcccacta

SEQ ID NO: 17252 - DNA, 21 bp, Homo sapiens
atatgtaaagrgttcaacatg

SEQ ID NO: 17253 - DNA, 21 bp, Homo sapiens
taggaggcaayggcgagggag

SEQ ID NO: 17254 - DNA, 21 bp, Homo sapiens
ccatgttacaygcaggggttc

SEQ ID NO: 17255 - DNA, 21 bp, Homo sapiens
ctctggttgayatcccttttc

SEQ ID NO: 17256 - DNA, 21 bp, Homo sapiens
agctgaaagcrgagggagctt

SEQ ID NO: 17257 - DNA, 21 bp, Homo sapiens
ttgtaaaacckgctcctttga

SEQ ID NO: 17258 - DNA, 21 bp, Homo sapiens
agcaagaagamattggctgta

SEQ ID NO: 17259 - DNA, 21 bp, Homo sapiens
taagttgccaratgaacactg

SEQ ID NO: 17260 - DNA, 21 bp, Homo sapiens
aaatttggaarcactgtgaca

SEQ ID NO: 17261 - DNA, 21 bp, Homo sapiens
acatgaaaacrgtgattgtat

SEQ ID NO: 17262 - DNA, 21 bp, Homo sapiens
atctcaacttrgcatgtttaa

SEQ ID NO: 17263 - DNA, 21 bp, Homo sapiens
cgttttgttgyctcaatttgt

SEQ ID NO: 17264 - DNA, 21 bp, Homo sapiens
aaggctgaagkctaaagggaa

SEQ ID NO: 17265 - DNA, 21 bp, Homo sapiens
ggaggtatgcyatttaaaggt

SEQ ID NO: 17266 - DNA, 21 bp, Homo sapiens
atcctggacakacgacttcca

SEQ ID NO: 17267 - DNA, 21 bp, Homo sapiens
tactaaaccaygctgcagcct

SEQ ID NO: 17268 - DNA, 21 bp, Homo sapiens
gtaacagtaarcaatgaaaaa

SEQ ID NO: 17269 - DNA, 21 bp, Homo sapiens
ccaaagtcaayatcaaattgt

SEQ ID NO: 17270 - DNA, 21 bp, Homo sapiens
acgtacagcayacacaaaaaa

SEQ ID NO: 17271 - DNA, 21 bp, Homo sapiens
aataccctgtkttctcactta

SEQ ID NO: 17272 - DNA, 21 bp, Homo sapiens
atcctcagtayttctttggtg

SEQ ID NO: 17273 - DNA, 21 bp, Homo sapiens
cctaaccatgyatttcctgag

SEQ ID NO: 17274 - DNA, 21 bp, Homo sapiens
tcctgctggayttgttgatcc

SEQ ID NO: 17275 - DNA, 21 bp, Homo sapiens
tcaaaaatatrttttgctgtc

SEQ ID NO: 17276 - DNA, 21 bp, Homo sapiens
gctaccagctygtattgaaac

SEQ ID NO: 17277 - DNA, 21 bp, Homo sapiens
gcactcacttrcaatcagacc

SEQ ID NO: 17278 - DNA, 21 bp, Homo sapiens
caaatagcttrcaattaagct

SEQ ID NO: 17279 - DNA, 21 bp, Homo sapiens
ccttttccccmggtccagaaa

SEQ ID NO: 17280 - DNA, 21 bp, Homo sapiens
tgtgtccatayctataactaa

SEQ ID NO: 17281 - DNA, 21 bp, Homo sapiens
aaacttgcaakctcactgggt

SEQ ID NO: 17282 - DNA, 21 bp, Homo sapiens
tgttacttgayaaaataattc

SEQ ID NO: 17283 - DNA, 21 bp, Homo sapiens
caaggatgttraaagcttttg

SEQ ID NO: 17284 - DNA, 21 bp, Homo sapiens
ctccttccccrtaactacagt

SEQ ID NO: 17285 - DNA, 21 bp, Homo sapiens
ttaagggaccrttagtaggaa

SEQ ID NO: 17286 - DNA, 21 bp, Homo sapiens
tccagaaaggrgacccaccag

SEQ ID NO: 17287 - DNA, 21 bp, Homo sapiens
tccacccaagrtgccccttgt

SEQ ID NO: 17288 - DNA, 21 bp, Homo sapiens
ctgaattaatytgcctataaa

SEQ ID NO: 17289 - DNA, 21 bp, Homo sapiens
gattcagctaygggaaaggcg

SEQ ID NO: 17290 - DNA, 21 bp, Homo sapiens
cttctccaaayctctcagtct

SEQ ID NO: 17291 - DNA, 21 bp, Homo sapiens
ggacaaaagaygcaacacagg

SEQ ID NO: 17292 - DNA, 21 bp, Homo sapiens
cttagtagtamgcaaaaacac

SEQ ID NO: 17293 - DNA, 21 bp, Homo sapiens
gatgttctacytttctaacaa

SEQ ID NO: 17294 - DNA, 21 bp, Homo sapiens
taaccaaaatkgctaacctta

SEQ ID NO: 17295 - DNA, 21 bp, Homo sapiens
aaagaaggcayaatctcaaga

SEQ ID NO: 17296 - DNA, 21 bp, Homo sapiens
caagaaatagrtggtttgagg

SEQ ID NO: 17297 - DNA, 21 bp, Homo sapiens
tttgacatcartgataatttt

SEQ ID NO: 17298 - DNA, 21 bp, Homo sapiens
ctgctatctcratttctgtga

SEQ ID NO: 17299 - DNA, 21 bp, Homo sapiens
ttcagacctcmctattctctg

SEQ ID NO: 17300 - DNA, 21 bp, Homo sapiens
aaagaactgtkggggtggcct

SEQ ID NO: 17301 - DNA, 21 bp, Homo sapiens
gatgttaaacrtgagatatta

SEQ ID NO: 17302 - DNA, 21 bp, Homo sapiens
ttattcttcayccactggtca

SEQ ID NO: 17303 - DNA, 21 bp, Homo sapiens
ttggggtagtraatgatgatg

SEQ ID NO: 17304 - DNA, 21 bp, Homo sapiens
ctatctgtgarggagctaaga

SEQ ID NO: 17305 - DNA, 21 bp, Homo sapiens
aagaagcccarttaaaaatca

SEQ ID NO: 17306 - DNA, 21 bp, Homo sapiens
agtcaaagacygaaatgtctg

SEQ ID NO: 17307 - DNA, 21 bp, Homo sapiens
ggtaggggtcygttaatctga

SEQ ID NO: 17308 - DNA, 21 bp, Homo sapiens
cattattaagragacaatttt

SEQ ID NO: 17309 - DNA, 21 bp, Homo sapiens
ggatctcccaraccaactgct

SEQ ID NO: 17310 - DNA, 21 bp, Homo sapiens
gttggaagccragactgtgac

SEQ ID NO: 17311 - DNA, 21 bp, Homo sapiens
cggagcaaccrgaactaacag

SEQ ID NO: 17312 - DNA, 21 bp, Homo sapiens
agaacagaggrgttactcagc

SEQ ID NO: 17313 - DNA, 21 bp, Homo sapiens
cagttggaaayttaaaaacaa

SEQ ID NO: 17314 - DNA, 21 bp, Homo sapiens
aatactgatgyggctgctgaa

SEQ ID NO: 17315 - DNA, 21 bp, Homo sapiens
tggaagcctcrgtataacagc

SEQ ID NO: 17316 - DNA, 21 bp, Homo sapiens
atgtcttgaayatagcaacag

SEQ ID NO: 17317 - DNA, 21 bp, Homo sapiens
ggggtcgactrttctgaatct

SEQ ID NO: 17318 - DNA, 21 bp, Homo sapiens
ttgcagaggcmtaatttcgac

SEQ ID NO: 17319 - DNA, 21 bp, Homo sapiens
tagtgttaagrgtgcaggcta

SEQ ID NO: 17320 - DNA, 21 bp, Homo sapiens
cctttttggcycaagggcatg

SEQ ID NO: 17321 - DNA, 21 bp, Homo sapiens
tcatgtccacrtaaacagagg

SEQ ID NO: 17322 - DNA, 21 bp, Homo sapiens
gttcacatggrtaggggacac

SEQ ID NO: 17323 - DNA, 21 bp, Homo sapiens
aagggggtgaraggtagtgac

SEQ ID NO: 17324 - DNA, 21 bp, Homo sapiens
tatcatataaragaatactac

SEQ ID NO: 17325 - DNA, 21 bp, Homo sapiens
cctatatgtcraataagctcc

SEQ ID NO: 17326 - DNA, 21 bp, Homo sapiens
ctcatttattygctccacata

SEQ ID NO: 17327 - DNA, 21 bp, Homo sapiens
acacaagcttycaccaggaag

SEQ ID NO: 17328 - DNA, 21 bp, Homo sapiens
tatagattctktagataatga

SEQ ID NO: 17329 - DNA, 21 bp, Homo sapiens
agctttaagcyactgtgggaa

SEQ ID NO: 17330 - DNA, 21 bp, Homo sapiens
ctactttgagrcaaccattcc

SEQ ID NO: 17331 - DNA, 21 bp, Homo sapiens
acaagatctaktctaataaaa

SEQ ID NO: 17332 - DNA, 21 bp, Homo sapiens
atgcctttcaktaccatgaga

SEQ ID NO: 17333 - DNA, 21 bp, Homo sapiens
gtgtgtgtgtrtaagggaact

SEQ ID NO: 17334 - DNA, 21 bp, Homo sapiens
gtctgttagcytcacgtcttc

SEQ ID NO: 17335 - DNA, 21 bp, Homo sapiens
caaccaaaaaygggaccgttt

SEQ ID NO: 17336 - DNA, 21 bp, Homo sapiens
tcatccccaayaaaggcagag

SEQ ID NO: 17337 - DNA, 21 bp, Homo sapiens
aaaggaatttkcccttaatat

SEQ ID NO: 17338 - DNA, 21 bp, Homo sapiens
caatgcacagyatatatggaa

SEQ ID NO: 17339 - DNA, 21 bp, Homo sapiens
tactcattttrcatattaaaa

SEQ ID NO: 17340 - DNA, 21 bp, Homo sapiens
actctgggctkctgtaacaga

SEQ ID NO: 17341 - DNA, 21 bp, Homo sapiens
ttttcacctayagcatgttta

SEQ ID NO: 17342 - DNA, 21 bp, Homo sapiens
aaacatgacarctacatactc

SEQ ID NO: 17343 - DNA, 21 bp, Homo sapiens
ttcagtggagraaggaagtgc

SEQ ID NO: 17344 - DNA, 21 bp, Homo sapiens
aaaactagtcrgtattactat

SEQ ID NO: 17345 - DNA, 21 bp, Homo sapiens
gtaccctttcraaagaaagct

SEQ ID NO: 17346 - DNA, 21 bp, Homo sapiens
tgcaaacctgytactaaccat

SEQ ID NO: 17347 - DNA, 21 bp, Homo sapiens
agaatattatrgtgaaatggg

SEQ ID NO: 17348 - DNA, 21 bp, Homo sapiens
aagacacaaakgcaagaagtg

SEQ ID NO: 17349 - DNA, 21 bp, Homo sapiens
ggctcagacaygccatcctct

SEQ ID NO: 17350 - DNA, 21 bp, Homo sapiens
gacagaaatcrtgagtcctcc

SEQ ID NO: 17351 - DNA, 21 bp, Homo sapiens
ccccgaaactytggcctgacg

SEQ ID NO: 17352 - DNA, 21 bp, Homo sapiens
tacaaggcagyaggcaaaaca

SEQ ID NO: 17353 - DNA, 21 bp, Homo sapiens
tctaacagcarctagtgggtg

SEQ ID NO: 17354 - DNA, 21 bp, Homo sapiens
aagcctgctaygctgctcccc

SEQ ID NO: 17355 - DNA, 21 bp, Homo sapiens
aattttaaaaragcccctgct

SEQ ID NO: 17356 - DNA, 21 bp, Homo sapiens
caaaactcagragcagcaact

SEQ ID NO: 17357 - DNA, 21 bp, Homo sapiens
ctgagtgcctrctatgtatgt

SEQ ID NO: 17358 - DNA, 21 bp, Homo sapiens
gagagggcagyttgaatccac

SEQ ID NO: 17359 - DNA, 21 bp, Homo sapiens
tgcagaggggmgcatgggtgt

SEQ ID NO: 17360 - DNA, 21 bp, Homo sapiens
tcattttcaayatcataattt

SEQ ID NO: 17361 - DNA, 21 bp, Homo sapiens
gaaaagaactygtgaggcaat

SEQ ID NO: 17362 - DNA, 21 bp, Homo sapiens
aacttaatggkcattataatt

SEQ ID NO: 17363 - DNA, 21 bp, Homo sapiens
ttttcagactyccaaacctcg

SEQ ID NO: 17364 - DNA, 21 bp, Homo sapiens
acaaatgctcyacactaaaaa

SEQ ID NO: 17365 - DNA, 21 bp, Homo sapiens
atttccacttyagttatacct

SEQ ID NO: 17366 - DNA, 21 bp, Homo sapiens
ctacctctgcrcatgatcatc

SEQ ID NO: 17367 - DNA, 21 bp, Homo sapiens
tgcagtagacrtagataggaa

SEQ ID NO: 17368 - DNA, 21 bp, Homo sapiens
taccatgcaayagacgtaaat

SEQ ID NO: 17369 - DNA, 21 bp, Homo sapiens
ataaacatgcrttcaaatctt

SEQ ID NO: 17370 - DNA, 21 bp, Homo sapiens
ctttttcaagytaaggaaatt

SEQ ID NO: 17371 - DNA, 21 bp, Homo sapiens
atgctacatcrtaataataat

SEQ ID NO: 17372 - DNA, 21 bp, Homo sapiens
atgaaccccaragaactcact

SEQ ID NO: 17373 - DNA, 21 bp, Homo sapiens
tgttatctccrtatctcttcc

SEQ ID NO: 17374 - DNA, 21 bp, Homo sapiens
atctctgaaayagattaaaca

SEQ ID NO: 17375 - DNA, 21 bp, Homo sapiens
tccaggctggrtttctttgtt

SEQ ID NO: 17376 - DNA, 21 bp, Homo sapiens
cattttgattmtacacttata

SEQ ID NO: 17377 - DNA, 21 bp, Homo sapiens
atttgtataarggagctatgg

SEQ ID NO: 17378 - DNA, 21 bp, Homo sapiens
agtgaatacamcaatatggaa

SEQ ID NO: 17379 - DNA, 21 bp, Homo sapiens
aaccataattyttctaggagt

SEQ ID NO: 17380 - DNA, 21 bp, Homo sapiens
ccacagttcayataacctgtt

SEQ ID NO: 17381 - DNA, 21 bp, Homo sapiens
gataatgaatrcactggtttt

SEQ ID NO: 17382 - DNA, 21 bp, Homo sapiens
agagaggtcargtgaatatgg

SEQ ID NO: 17383 - DNA, 21 bp, Homo sapiens
aaaaaacttaytcattaaagg

SEQ ID NO: 17384 - DNA, 21 bp, Homo sapiens
ctatcataatrtatggttaat

SEQ ID NO: 17385 - DNA, 21 bp, Homo sapiens
gaatggtgctrgaatgtagca

SEQ ID NO: 17386 - DNA, 21 bp, Homo sapiens
aatgactatgrtgtaaaatga

SEQ ID NO: 17387 - DNA, 21 bp, Homo sapiens
aatggaaaaarcagaagaagt

SEQ ID NO: 17388 - DNA, 21 bp, Homo sapiens
ggctgtgtccyaagggacaag

SEQ ID NO: 17389 - DNA, 21 bp, Homo sapiens
gaaagcatccrgcatatctta

SEQ ID NO: 17390 - DNA, 21 bp, Homo sapiens
agggaatttgkttttgtaatt

SEQ ID NO: 17391 - DNA, 21 bp, Homo sapiens
tcttcagcccygacctctatc

SEQ ID NO: 17392 - DNA, 21 bp, Homo sapiens
gtgtgtgtttycatgtccttt

SEQ ID NO: 17393 - DNA, 21 bp, Homo sapiens
ttgcatttctmatccattcct

SEQ ID NO: 17394 - DNA, 21 bp, Homo sapiens
gcctaatacaygttcttggac

SEQ ID NO: 17395 - DNA, 21 bp, Homo sapiens
gttttaagagrgaataaaacc

SEQ ID NO: 17396 - DNA, 21 bp, Homo sapiens
ttttgaaagakttacttaggc

SEQ ID NO: 17397 - DNA, 21 bp, Homo sapiens
tccctcctcarccttgctccc

SEQ ID NO: 17398 - DNA, 21 bp, Homo sapiens
ttggtcaatcmctgagtaact

SEQ ID NO: 17399 - DNA, 21 bp, Homo sapiens
agcttatttarttcccatttg

SEQ ID NO: 17400 - DNA, 21 bp, Homo sapiens
agagagggcaygtagaaactc

SEQ ID NO: 17401 - DNA, 21 bp, Homo sapiens
cctctccccamccctcatcat

SEQ ID NO: 17402 - DNA, 21 bp, Homo sapiens
acagtacccamgtgaggagct

SEQ ID NO: 17403 - DNA, 21 bp, Homo sapiens
taaggaaataygaacccagag

SEQ ID NO: 17404 - DNA, 21 bp, Homo sapiens
catctatcacraccacctagc

SEQ ID NO: 17405 - DNA, 21 bp, Homo sapiens
aaaaaagaccyatgcaagaat

SEQ ID NO: 17406 - DNA, 21 bp, Homo sapiens
tctatagtggrgaaaaaaagc

SEQ ID NO: 17407 - DNA, 21 bp, Homo sapiens
ggaaaagaatrtcaaagtatt

SEQ ID NO: 17408 - DNA, 21 bp, Homo sapiens
gcctttctcayaattagaaaa

SEQ ID NO: 17409 - DNA, 21 bp, Homo sapiens
agcatggggarcatgtacaga

SEQ ID NO: 17410 - DNA, 21 bp, Homo sapiens
gttttcggctrgtgtagtgaa

SEQ ID NO: 17411 - DNA, 21 bp, Homo sapiens
ataatagcgcrtccacttgtt

SEQ ID NO: 17412 - DNA, 21 bp, Homo sapiens
ttttattgatragtcaaataa

SEQ ID NO: 17413 - DNA, 21 bp, Homo sapiens
agcctggctcyggaaacatgc

SEQ ID NO: 17414 - DNA, 21 bp, Homo sapiens
attgacaattyttattcagaa

SEQ ID NO: 17415 - DNA, 21 bp, Homo sapiens
gaactagtgcygttggacaga

SEQ ID NO: 17416 - DNA, 21 bp, Homo sapiens
gaactataacmgatttacaca

SEQ ID NO: 17417 - DNA, 21 bp, Homo sapiens
cacagtgatgycagtggaaaa

SEQ ID NO: 17418 - DNA, 21 bp, Homo sapiens
tcatgtttctrgaattcagtg

SEQ ID NO: 17419 - DNA, 21 bp, Homo sapiens
caaataaggtracagaagtat

SEQ ID NO: 17420 - DNA, 21 bp, Homo sapiens
agtttatcctyatggattcga

SEQ ID NO: 17421 - DNA, 21 bp, Homo sapiens
ttcaaaatgartattagatta

SEQ ID NO: 17422 - DNA, 21 bp, Homo sapiens
cctagattaarcagaatgtac

SEQ ID NO: 17423 - DNA, 21 bp, Homo sapiens
tatacatactrtgagctcatt

SEQ ID NO: 17424 - DNA, 21 bp, Homo sapiens
gtgatggaggytccattctgt

SEQ ID NO: 17425 - DNA, 21 bp, Homo sapiens
acaattcttaygcttcccaag

SEQ ID NO: 17426 - DNA, 21 bp, Homo sapiens
tgatgaatttkatttagttaa

SEQ ID NO: 17427 - DNA, 21 bp, Homo sapiens
aatcaggctayggttccagct

SEQ ID NO: 17428 - DNA, 21 bp, Homo sapiens
aggacatttgmtcataaaagt

SEQ ID NO: 17429 - DNA, 21 bp, Homo sapiens
atctcacaggkggctttagct

SEQ ID NO: 17430 - DNA, 21 bp, Homo sapiens
tgtatgtgggyatttgtgagg

SEQ ID NO: 17431 - DNA, 21 bp, Homo sapiens
ttcaagcacaytgcattgctg

SEQ ID NO: 17432 - DNA, 21 bp, Homo sapiens
aacaaactgarcaagaaacca

SEQ ID NO: 17433 - DNA, 21 bp, Homo sapiens
gaaagagcagytggatatatg

SEQ ID NO: 17434 - DNA, 21 bp, Homo sapiens
cagaccttgtmtcacccttca

SEQ ID NO: 17435 - DNA, 21 bp, Homo sapiens
taattagtctyagttgcttat

SEQ ID NO: 17436 - DNA, 21 bp, Homo sapiens
aggtcaaagcrtataactaac

SEQ ID NO: 17437 - DNA, 21 bp, Homo sapiens
tatgctaaagraattgtacag

SEQ ID NO: 17438 - DNA, 21 bp, Homo sapiens
ccttgtctctyacagctgcat

SEQ ID NO: 17439 - DNA, 21 bp, Homo sapiens
ttgaaccacarattgattccc

SEQ ID NO: 17440 - DNA, 21 bp, Homo sapiens
gatggcaaagyctttctaccc

SEQ ID NO: 17441 - DNA, 21 bp, Homo sapiens
gggagtcttaycaccttgggg

SEQ ID NO: 17442 - DNA, 21 bp, Homo sapiens
ttctcctttaygctaggtgac

SEQ ID NO: 17443 - DNA, 21 bp, Homo sapiens
ttccacacttrgcatattact

SEQ ID NO: 17444 - DNA, 21 bp, Homo sapiens
aacttacaagkatccattgca

SEQ ID NO: 17445 - DNA, 21 bp, Homo sapiens
ggctttgtaartgtctaggca

SEQ ID NO: 17446 - DNA, 21 bp, Homo sapiens
tgatatttctkctctgttttc

SEQ ID NO: 17447 - DNA, 21 bp, Homo sapiens
ccctcccaccycctagcacta

SEQ ID NO: 17448 - DNA, 21 bp, Homo sapiens
gtatttttggyggattgcatc

SEQ ID NO: 17449 - DNA, 21 bp, Homo sapiens
tggctatgacrtgcactccat

SEQ ID NO: 17450 - DNA, 21 bp, Homo sapiens
ccaccaggacrttggaagtcg

SEQ ID NO: 17451 - DNA, 21 bp, Homo sapiens
ggtggcaattkgggaaggggt

SEQ ID NO: 17452 - DNA, 21 bp, Homo sapiens
gaaaactgtcrtactgacgcg

SEQ ID NO: 17453 - DNA, 21 bp, Homo sapiens
ctgactggctyagcttaagtg

SEQ ID NO: 17454 - DNA, 21 bp, Homo sapiens
ttctaattggrtgctccctgc

SEQ ID NO: 17455 - DNA, 21 bp, Homo sapiens
tttccccaaaygggctttgtg

SEQ ID NO: 17456 - DNA, 21 bp, Homo sapiens
agattaagccrgtcatattgt

SEQ ID NO: 17457 - DNA, 21 bp, Homo sapiens
atgttgttcarcaacagtaat

SEQ ID NO: 17458 - DNA, 21 bp, Homo sapiens
ctttgtgttcytctggagccc

SEQ ID NO: 17459 - DNA, 21 bp, Homo sapiens
tcatccaccgytgtgaaaact

SEQ ID NO: 17460 - DNA, 21 bp, Homo sapiens
tgcaatagccytttctccaat

SEQ ID NO: 17461 - DNA, 21 bp, Homo sapiens
ggcacaaaatrggacacagag

SEQ ID NO: 17462 - DNA, 21 bp, Homo sapiens
gaggagtgaarcactggcaca

SEQ ID NO: 17463 - DNA, 21 bp, Homo sapiens
cccactgggcratacactttc

SEQ ID NO: 17464 - DNA, 21 bp, Homo sapiens
gagggcagatygctttcctct

SEQ ID NO: 17465 - DNA, 21 bp, Homo sapiens
gtgagaaacaygggatttctc

SEQ ID NO: 17466 - DNA, 21 bp, Homo sapiens
agatgaggcakctggaagatg

SEQ ID NO: 17467 - DNA, 21 bp, Homo sapiens
taaaacactgrggatcccaaa

SEQ ID NO: 17468 - DNA, 21 bp, Homo sapiens
ctggcaacatyggaacaggag

SEQ ID NO: 17469 - DNA, 21 bp, Homo sapiens
atgaaggaagyagggtagcat

SEQ ID NO: 17470 - DNA, 21 bp, Homo sapiens
catcaaattgytccacaatgg

SEQ ID NO: 17471 - DNA, 21 bp, Homo sapiens
ggcatggcagkgtgacacaca

SEQ ID NO: 17472 - DNA, 21 bp, Homo sapiens
ggtcaatgctrcacttaatat

SEQ ID NO: 17473 - DNA, 21 bp, Homo sapiens
actctgatttkcccacttgga

SEQ ID NO: 17474 - DNA, 21 bp, Homo sapiens
gtttctgagtrtaaaatttta

SEQ ID NO: 17475 - DNA, 21 bp, Homo sapiens
agatcaaaggygctcagcact

SEQ ID NO: 17476 - DNA, 21 bp, Homo sapiens
gagacagattkcagggagggg

SEQ ID NO: 17477 - DNA, 21 bp, Homo sapiens
taagcccagayggtcataaga

SEQ ID NO: 17478 - DNA, 21 bp, Homo sapiens
attgtagatcrtcagcatgtt

SEQ ID NO: 17479 - DNA, 21 bp, Homo sapiens
taaaaagttamtttaaaaatg

SEQ ID NO: 17480 - DNA, 21 bp, Homo sapiens
gcagacgtagyggtgtgcacc

SEQ ID NO: 17481 - DNA, 21 bp, Homo sapiens
tctgtgcccaytgaagctaac

SEQ ID NO: 17482 - DNA, 21 bp, Homo sapiens
gatgcccaggygggagagggg

SEQ ID NO: 17483 - DNA, 21 bp, Homo sapiens
ggaggccggamcacatccaat

SEQ ID NO: 17484 - DNA, 21 bp, Homo sapiens
gatgaaccatraggagatgat

SEQ ID NO: 17485 - DNA, 21 bp, Homo sapiens
tgagtgcggcrcttcccaggc

SEQ ID NO: 17486 - DNA, 21 bp, Homo sapiens
cccaccatgcygtgcacctta

SEQ ID NO: 17487 - DNA, 21 bp, Homo sapiens
agcaaacctcrctggggaatg

SEQ ID NO: 17488 - DNA, 21 bp, Homo sapiens
tgccaaagaaygggtggggga

SEQ ID NO: 17489 - DNA, 21 bp, Homo sapiens
ttttacaagcrtctgtgttac

SEQ ID NO: 17490 - DNA, 21 bp, Homo sapiens
taattttccaygaagtaactt

SEQ ID NO: 17491 - DNA, 21 bp, Homo sapiens
agcgaagccargagaaagggt

SEQ ID NO: 17492 - DNA, 21 bp, Homo sapiens
ctcaaatccarctctgccaaa

SEQ ID NO: 17493 - DNA, 21 bp, Homo sapiens
ttcagctgcayggccatatat

SEQ ID NO: 17494 - DNA, 21 bp, Homo sapiens
tgacacaacgmcaccaccttc

SEQ ID NO: 17495 - DNA, 21 bp, Homo sapiens
atctatggctygtcgggcaga

SEQ ID NO: 17496 - DNA, 21 bp, Homo sapiens
tgcagctgccytttccagggg

SEQ ID NO: 17497 - DNA, 21 bp, Homo sapiens
tggctgacccrgatatgaggt

SEQ ID NO: 17498 - DNA, 21 bp, Homo sapiens
agattttataytttagagcca

SEQ ID NO: 17499 - DNA, 21 bp, Homo sapiens
gcagaaatccyacgcctatct

SEQ ID NO: 17500 - DNA, 21 bp, Homo sapiens
gtaaattcaaygtgattgctg

SEQ ID NO: 17501 - DNA, 21 bp, Homo sapiens
aggcgcaaggytacttacttc

SEQ ID NO: 17502 - DNA, 21 bp, Homo sapiens
actctagtgcrgtatcaaaac

SEQ ID NO: 17503 - DNA, 21 bp, Homo sapiens
agtgtacttayacaaacctag

SEQ ID NO: 17504 - DNA, 21 bp, Homo sapiens
tagtggtcagkcctgggtgag

SEQ ID NO: 17505 - DNA, 21 bp, Homo sapiens
atgctgaattygctggggtcc

SEQ ID NO: 17506 - DNA, 21 bp, Homo sapiens
acggtcatctrcgtgtattcc

SEQ ID NO: 17507 - DNA, 21 bp, Homo sapiens
gagccacttcyacgtaccagg

SEQ ID NO: 17508 - DNA, 21 bp, Homo sapiens
gaggtcagtgrgtgggagggc

SEQ ID NO: 17509 - DNA, 21 bp, Homo sapiens
ccttccttccygggccccagc

SEQ ID NO: 17510 - DNA, 21 bp, Homo sapiens
accgatctttytttctgatga

SEQ ID NO: 17511 - DNA, 21 bp, Homo sapiens
ccctggcaggkgagatggacc

SEQ ID NO: 17512 - DNA, 21 bp, Homo sapiens
atgcatctaaygtacaaaata

SEQ ID NO: 17513 - DNA, 21 bp, Homo sapiens
aggaacaagargtaaggatga

SEQ ID NO: 17514 - DNA, 21 bp, Homo sapiens
taacaaggackccctaaatac

SEQ ID NO: 17515 - DNA, 21 bp, Homo sapiens
aagtgatgggyacagtaaaaa

SEQ ID NO: 17516 - DNA, 21 bp, Homo sapiens
ttggtctaggyaaagaattca

SEQ ID NO: 17517 - DNA, 21 bp, Homo sapiens
aaactatgccrctgacagggg

SEQ ID NO: 17518 - DNA, 21 bp, Homo sapiens
cttctgtgggktcagtgccct

SEQ ID NO: 17519 - DNA, 21 bp, Homo sapiens
cgataccataytaagtaggct

SEQ ID NO: 17520 - DNA, 21 bp, Homo sapiens
atgggctctgygtgtttgtgc

SEQ ID NO: 17521 - DNA, 21 bp, Homo sapiens
ggctttttgtrgagtgtaaat

SEQ ID NO: 17522 - DNA, 21 bp, Homo sapiens
agagttgtggygcttgatgat

SEQ ID NO: 17523 - DNA, 21 bp, Homo sapiens
tcctttggggrtattcaagga

SEQ ID NO: 17524 - DNA, 21 bp, Homo sapiens
tactatgcaaragctcacggg

SEQ ID NO: 17525 - DNA, 21 bp, Homo sapiens
ctacaagggcrttttaattgt

SEQ ID NO: 17526 - DNA, 21 bp, Homo sapiens
gcaagggaaaraaagaaagag

SEQ ID NO: 17527 - DNA, 21 bp, Homo sapiens
gattatattcragtcatcaca

SEQ ID NO: 17528 - DNA, 21 bp, Homo sapiens
aggaaatcccrcagcccggtc

SEQ ID NO: 17529 - DNA, 21 bp, Homo sapiens
cctctaccagyccacctggtg

SEQ ID NO: 17530 - DNA, 21 bp, Homo sapiens
gcaagtcccaygctggttatt

SEQ ID NO: 17531 - DNA, 21 bp, Homo sapiens
tagaaatcacygttattgtcc

SEQ ID NO: 17532 - DNA, 21 bp, Homo sapiens
gtaatacttcyatcctttctc

SEQ ID NO: 17533 - DNA, 21 bp, Homo sapiens
caggcaccgtractcactcct

SEQ ID NO: 17534 - DNA, 21 bp, Homo sapiens
gcccagcagayattcaaatta

SEQ ID NO: 17535 - DNA, 21 bp, Homo sapiens
ctacattttartaagggtttt

SEQ ID NO: 17536 - DNA, 21 bp, Homo sapiens
ctttcaattayaatcactctg

SEQ ID NO: 17537 - DNA, 21 bp, Homo sapiens
accagttgtgkttggatattg

SEQ ID NO: 17538 - DNA, 21 bp, Homo sapiens
aatgctaaaarcggacattga

SEQ ID NO: 17539 - DNA, 21 bp, Homo sapiens
caggccactaygttacctata

SEQ ID NO: 17540 - DNA, 21 bp, Homo sapiens
gaagcctgtcrcaggtgaggg

SEQ ID NO: 17541 - DNA, 21 bp, Homo sapiens
taatgtatgtrtgtgtgtgtg

SEQ ID NO: 17542 - DNA, 21 bp, Homo sapiens
acaggggcggyggggagacat

SEQ ID NO: 17543 - DNA, 21 bp, Homo sapiens
atatcggcaayaataggtagc

SEQ ID NO: 17544 - DNA, 21 bp, Homo sapiens
gtagttcctcrgttcagtact

SEQ ID NO: 17545 - DNA, 21 bp, Homo sapiens
aggggagggartgctgcctct

SEQ ID NO: 17546 - DNA, 21 bp, Homo sapiens
aaaatctgacyaattcttcag

SEQ ID NO: 17547 - DNA, 21 bp, Homo sapiens
cgtttttgccyacctttcctt

SEQ ID NO: 17548 - DNA, 21 bp, Homo sapiens
cgctgagatgygtaatgtcac

SEQ ID NO: 17549 - DNA, 21 bp, Homo sapiens
aaagtcacgcrattgaatttt

SEQ ID NO: 17550 - DNA, 21 bp, Homo sapiens
gagccaccacrtccaactaat

SEQ ID NO: 17551 - DNA, 21 bp, Homo sapiens
gttgttctgcyggcctgcaag

SEQ ID NO: 17552 - DNA, 21 bp, Homo sapiens
aaagctactgkagaaaaacac

SEQ ID NO: 17553 - DNA, 21 bp, Homo sapiens
tctgcagtgcrgaactgcctc

SEQ ID NO: 17554 - DNA, 21 bp, Homo sapiens
gcatcacaccrtccacaggct

SEQ ID NO: 17555 - DNA, 21 bp, Homo sapiens
ttcctaaaatyaagaatgttc

SEQ ID NO: 17556 - DNA, 21 bp, Homo sapiens
ttcgccttgaygcttgaaaaa

SEQ ID NO: 17557 - DNA, 21 bp, Homo sapiens
tcttcagataytgtatcttcg

SEQ ID NO: 17558 - DNA, 21 bp, Homo sapiens
caacgttacartgatgggcag

SEQ ID NO: 17559 - DNA, 21 bp, Homo sapiens
ttccatgcaaytctaattaaa

SEQ ID NO: 17560 - DNA, 21 bp, Homo sapiens
atcctctttaytgcagcctta

SEQ ID NO: 17561 - DNA, 21 bp, Homo sapiens
ctacagttctrtttttaacat

SEQ ID NO: 17562 - DNA, 21 bp, Homo sapiens
cactgcaggcrcaagaccagc

SEQ ID NO: 17563 - DNA, 21 bp, Homo sapiens
accacattagygtcaacaatt

SEQ ID NO: 17564 - DNA, 21 bp, Homo sapiens
cattaaaaacrtcacctgctt

SEQ ID NO: 17565 - DNA, 21 bp, Homo sapiens
aatctatgagygagtatctat

SEQ ID NO: 17566 - DNA, 21 bp, Homo sapiens
ggaacactgaygccaatgctg

SEQ ID NO: 17567 - DNA, 21 bp, Homo sapiens
tccatggcatytgacactgct

SEQ ID NO: 17568 - DNA, 21 bp, Homo sapiens
ggagagagggrtgcccatgag

SEQ ID NO: 17569 - DNA, 21 bp, Homo sapiens
tgaacacaaaygtttttttct

SEQ ID NO: 17570 - DNA, 21 bp, Homo sapiens
gacccacctcyccgtctgtat

SEQ ID NO: 17571 - DNA, 21 bp, Homo sapiens
cttcacttgcrcaatccatga

SEQ ID NO: 17572 - DNA, 21 bp, Homo sapiens
agcatatcccrttttgtaggt

SEQ ID NO: 17573 - DNA, 21 bp, Homo sapiens
gaacagtcttmctggagtgaa

SEQ ID NO: 17574 - DNA, 21 bp, Homo sapiens
tttgcccgcaygggcactttt

SEQ ID NO: 17575 - DNA, 21 bp, Homo sapiens
aaagacatgcrgctactcctg

SEQ ID NO: 17576 - DNA, 21 bp, Homo sapiens
ctgagatcgaytgttggcctg

SEQ ID NO: 17577 - DNA, 21 bp, Homo sapiens
acagatgtccrtgacagggct

SEQ ID NO: 17578 - DNA, 21 bp, Homo sapiens
ccaagaagccrtgggcaagcc

SEQ ID NO: 17579 - DNA, 21 bp, Homo sapiens
cctgcccacayaggggattcc

SEQ ID NO: 17580 - DNA, 21 bp, Homo sapiens
gtcaccaaatmtgctggcgcc

SEQ ID NO: 17581 - DNA, 21 bp, Homo sapiens
aaaaaggacaygttacataca

SEQ ID NO: 17582 - DNA, 21 bp, Homo sapiens
caacaagttaygtaacaacaa

SEQ ID NO: 17583 - DNA, 21 bp, Homo sapiens
tatgtccctayagcagtggaa

SEQ ID NO: 17584 - DNA, 21 bp, Homo sapiens
ggttactacgmgtaatagtga

SEQ ID NO: 17585 - DNA, 21 bp, Homo sapiens
ccacttacttycatcccactg

SEQ ID NO: 17586 - DNA, 21 bp, Homo sapiens
aaattgtcctrtgcatcccct

SEQ ID NO: 17587 - DNA, 21 bp, Homo sapiens
actagttttcrtttgtgttga

SEQ ID NO: 17588 - DNA, 21 bp, Homo sapiens
ggggaaacggrctcttggcag

SEQ ID NO: 17589 - DNA, 21 bp, Homo sapiens
agcagcacggrggacgatgaa

SEQ ID NO: 17590 - DNA, 21 bp, Homo sapiens
aattcctactrtgataaagga

SEQ ID NO: 17591 - DNA, 21 bp, Homo sapiens
aatcaagcaaygtctttagtc

SEQ ID NO: 17592 - DNA, 21 bp, Homo sapiens
tgaaataattyggaagtaatg

SEQ ID NO: 17593 - DNA, 21 bp, Homo sapiens
gtattagggtrtacgatccct

SEQ ID NO: 17594 - DNA, 21 bp, Homo sapiens
taacagctgcratcgtgttcc

SEQ ID NO: 17595 - DNA, 21 bp, Homo sapiens
agtagagagamagaggaagga

SEQ ID NO: 17596 - DNA, 21 bp, Homo sapiens
gagattgatgrgcattgtggt

SEQ ID NO: 17597 - DNA, 21 bp, Homo sapiens
cgtgggaatarcagttagggt

SEQ ID NO: 17598 - DNA, 21 bp, Homo sapiens
agacatccacmtcatcttggc

SEQ ID NO: 17599 - DNA, 21 bp, Homo sapiens
tttttttagtraggtggtgtc

SEQ ID NO: 17600 - DNA, 21 bp, Homo sapiens
tgctacctacmaactttttct

SEQ ID NO: 17601 - DNA, 21 bp, Homo sapiens
aagcacccgtygtatggtgta

SEQ ID NO: 17602 - DNA, 21 bp, Homo sapiens
atagatttttyaatcgtagtt

SEQ ID NO: 17603 - DNA, 21 bp, Homo sapiens
tgtagagtttktatgttatgg

SEQ ID NO: 17604 - DNA, 21 bp, Homo sapiens
tcaccctctaragtccttact

SEQ ID NO: 17605 - DNA, 21 bp, Homo sapiens
cagttctcttyatggtggaaa

SEQ ID NO: 17606 - DNA, 21 bp, Homo sapiens
catcaaattcmgtctatagta

SEQ ID NO: 17607 - DNA, 21 bp, Homo sapiens
gttctccctgmattttaagga

SEQ ID NO: 17608 - DNA, 21 bp, Homo sapiens
caaaagggggrtggggaaaag

SEQ ID NO: 17609 - DNA, 21 bp, Homo sapiens
acaggtaagcmtggattactg

SEQ ID NO: 17610 - DNA, 21 bp, Homo sapiens
ataattctaaygtagaaggtg

SEQ ID NO: 17611 - DNA, 21 bp, Homo sapiens
aacttgtctcygaaaagcttt

SEQ ID NO: 17612 - DNA, 21 bp, Homo sapiens
gcactaaaatytatctttaca

SEQ ID NO: 17613 - DNA, 21 bp, Homo sapiens
tggagaaaagrttttaaagaa

SEQ ID NO: 17614 - DNA, 21 bp, Homo sapiens
cgtctattctmttgtaatgaa

SEQ ID NO: 17615 - DNA, 21 bp, Homo sapiens
tttatcagtarcttattattt

SEQ ID NO: 17616 - DNA, 21 bp, Homo sapiens
ccatggaaatrtcatcctttc

SEQ ID NO: 17617 - DNA, 21 bp, Homo sapiens
accccaaataytatctaatag

SEQ ID NO: 17618 - DNA, 21 bp, Homo sapiens
gaataatctcygtatcccaag

SEQ ID NO: 17619 - DNA, 21 bp, Homo sapiens
ttccttcctgytttttttctg

SEQ ID NO: 17620 - DNA, 21 bp, Homo sapiens
agaaggttttytgaaccactg

SEQ ID NO: 17621 - DNA, 21 bp, Homo sapiens
agctcagcaaygtatagccta

SEQ ID NO: 17622 - DNA, 21 bp, Homo sapiens
tgtctatcctkgagtaaaaat

SEQ ID NO: 17623 - DNA, 21 bp, Homo sapiens
ctggattttcmtatcagccag

SEQ ID NO: 17624 - DNA, 21 bp, Homo sapiens
gggtggagcayccctcagctg

SEQ ID NO: 17625 - DNA, 21 bp, Homo sapiens
tgggtcagtgycgctacccac

SEQ ID NO: 17626 - DNA, 21 bp, Homo sapiens
ttattgcaatkaatcttctca

SEQ ID NO: 17627 - DNA, 21 bp, Homo sapiens
cctttttggcmtataccatgt

SEQ ID NO: 17628 - DNA, 21 bp, Homo sapiens
tccttttatayctaataagga

SEQ ID NO: 17629 - DNA, 21 bp, Homo sapiens
tcacctaggamaaaagcagat

SEQ ID NO: 17630 - DNA, 21 bp, Homo sapiens
cagttcacagygaaagaagac

SEQ ID NO: 17631 - DNA, 21 bp, Homo sapiens
ataagttcacrgcatcagctt

SEQ ID NO: 17632 - DNA, 21 bp, Homo sapiens
ggaaattgttrctggatcata

SEQ ID NO: 17633 - DNA, 21 bp, Homo sapiens
gatatttgatrataatgtttc

SEQ ID NO: 17634 - DNA, 21 bp, Homo sapiens
tgtatatattytgttttctga

SEQ ID NO: 17635 - DNA, 21 bp, Homo sapiens
gtctgggatayagcagtgaca

SEQ ID NO: 17636 - DNA, 21 bp, Homo sapiens
atacaaacacrtggtttcctt

SEQ ID NO: 17637 - DNA, 21 bp, Homo sapiens
ccacatcccargcctggtctc

SEQ ID NO: 17638 - DNA, 21 bp, Homo sapiens
aaccccagtcmcaactccccg

SEQ ID NO: 17639 - DNA, 21 bp, Homo sapiens
gggctgcgcgytggcaattag

SEQ ID NO: 17640 - DNA, 21 bp, Homo sapiens
ttccctcccaratgcaaccca

SEQ ID NO: 17641 - DNA, 21 bp, Homo sapiens
aggatctcacrggtggagcag

SEQ ID NO: 17642 - DNA, 21 bp, Homo sapiens
tgtaggagtgrgattacgggg

SEQ ID NO: 17643 - DNA, 21 bp, Homo sapiens
agctcaatggktggcttcctc

SEQ ID NO: 17644 - DNA, 21 bp, Homo sapiens
gtgtgaagggyggacggagag

SEQ ID NO: 17645 - DNA, 21 bp, Homo sapiens
caagacacgckcaggcaaggc

SEQ ID NO: 17646 - DNA, 21 bp, Homo sapiens
taccacgcccrgcgcaaagat

SEQ ID NO: 17647 - DNA, 21 bp, Homo sapiens
cttaaaacagyataagcattc

SEQ ID NO: 17648 - DNA, 21 bp, Homo sapiens
ggtgcttgagytataacatag

SEQ ID NO: 17649 - DNA, 21 bp, Homo sapiens
tagcataatayaatcactttt

SEQ ID NO: 17650 - DNA, 21 bp, Homo sapiens
tcaagtggttkccaagctcct

SEQ ID NO: 17651 - DNA, 21 bp, Homo sapiens
tgcaaatttgycatcataata

SEQ ID NO: 17652 - DNA, 21 bp, Homo sapiens
gaatggtcttrctccttggcc

SEQ ID NO: 17653 - DNA, 21 bp, Homo sapiens
cagatggtgarattcttggat

SEQ ID NO: 17654 - DNA, 21 bp, Homo sapiens
gtcaggtactrtccccttccg

SEQ ID NO: 17655 - DNA, 21 bp, Homo sapiens
accacaatgargaataacagg

SEQ ID NO: 17656 - DNA, 21 bp, Homo sapiens
ctcccagtgtyctcattagtg

SEQ ID NO: 17657 - DNA, 21 bp, Homo sapiens
ttgtgtgagtytgtcttctag

SEQ ID NO: 17658 - DNA, 21 bp, Homo sapiens
taaacaaacayagggaagatg

SEQ ID NO: 17659 - DNA, 21 bp, Homo sapiens
ggcaccacctkgtgaaaagca

SEQ ID NO: 17660 - DNA, 21 bp, Homo sapiens
aacttctttaytatgtatttt

SEQ ID NO: 17661 - DNA, 21 bp, Homo sapiens
catgggtacayagtaaagtgc

SEQ ID NO: 17662 - DNA, 21 bp, Homo sapiens
gctgtaaaggrtgtctcactt

SEQ ID NO: 17663 - DNA, 21 bp, Homo sapiens
ctgccctgagrccttggttct

SEQ ID NO: 17664 - DNA, 21 bp, Homo sapiens
actttggaggraatctaatga

SEQ ID NO: 17665 - DNA, 21 bp, Homo sapiens
aatttacccarcggccacgac

SEQ ID NO: 17666 - DNA, 21 bp, Homo sapiens
ttcaaatgccrtgggaattag

SEQ ID NO: 17667 - DNA, 21 bp, Homo sapiens
aacgggaacarggatcagtga

SEQ ID NO: 17668 - DNA, 21 bp, Homo sapiens
gtttgcacagygaatgtaatt

SEQ ID NO: 17669 - DNA, 21 bp, Homo sapiens
attctgaaaarctgggtcgaa

SEQ ID NO: 17670 - DNA, 21 bp, Homo sapiens
tacagggtatrggtcgagctg

SEQ ID NO: 17671 - DNA, 21 bp, Homo sapiens
ctataagcacmaataacatag

SEQ ID NO: 17672 - DNA, 21 bp, Homo sapiens
ctgtcaccttmttagagcctc

SEQ ID NO: 17673 - DNA, 21 bp, Homo sapiens
taataaatgtktggtgactgt

SEQ ID NO: 17674 - DNA, 21 bp, Homo sapiens
tttgtcacgakgtgatttagt

SEQ ID NO: 17675 - DNA, 21 bp, Homo sapiens
ctggcacagakggctttctct

SEQ ID NO: 17676 - DNA, 21 bp, Homo sapiens
tcaataagcamctgtcaagag

SEQ ID NO: 17677 - DNA, 21 bp, Homo sapiens
aagtgccagayaggtaattaa

SEQ ID NO: 17678 - DNA, 21 bp, Homo sapiens
tttgctgttcraatcacagct

SEQ ID NO: 17679 - DNA, 21 bp, Homo sapiens
caaattgattytcccactgtc

SEQ ID NO: 17680 - DNA, 21 bp, Homo sapiens
tattccagagrgctcataggt

SEQ ID NO: 17681 - DNA, 21 bp, Homo sapiens
agattaaatayaggcaggtat

SEQ ID NO: 17682 - DNA, 21 bp, Homo sapiens
ttctctggctkcaactaagac

SEQ ID NO: 17683 - DNA, 21 bp, Homo sapiens
tcataaatccmgctcctctca

SEQ ID NO: 17684 - DNA, 21 bp, Homo sapiens
aaacttgcagractttgtact

SEQ ID NO: 17685 - DNA, 21 bp, Homo sapiens
cattaccaaakgaaaaaaatc

SEQ ID NO: 17686 - DNA, 21 bp, Homo sapiens
ctgcttaatgyggcttccagc

SEQ ID NO: 17687 - DNA, 21 bp, Homo sapiens
tctttaccgtrcatttacaga

SEQ ID NO: 17688 - DNA, 21 bp, Homo sapiens
tcatcactctygaggctatct

SEQ ID NO: 17689 - DNA, 21 bp, Homo sapiens
ttcttccttaygagtttttct

SEQ ID NO: 17690 - DNA, 21 bp, Homo sapiens
ttacctcccgyctttggccac

SEQ ID NO: 17691 - DNA, 21 bp, Homo sapiens
atctctctgaygggttcagaa

SEQ ID NO: 17692 - DNA, 21 bp, Homo sapiens
acactttgagytttctatcgg

SEQ ID NO: 17693 - DNA, 21 bp, Homo sapiens
taagaaaattraatacatttg

SEQ ID NO: 17694 - DNA, 21 bp, Homo sapiens
tttgaacaaayctcaaaagac

SEQ ID NO: 17695 - DNA, 21 bp, Homo sapiens
ttgggcgcccktggccctgca

SEQ ID NO: 17696 - DNA, 21 bp, Homo sapiens
cctccctccargcccagggcc

SEQ ID NO: 17697 - DNA, 21 bp, Homo sapiens
gagtcacttcrtgagtccaag

SEQ ID NO: 17698 - DNA, 21 bp, Homo sapiens
ctcaggatcaygcctgtccag

SEQ ID NO: 17699 - DNA, 21 bp, Homo sapiens
cagcaggcgtktgttcaaagg

SEQ ID NO: 17700 - DNA, 21 bp, Homo sapiens
ggcccatgaargccttgggac

SEQ ID NO: 17701 - DNA, 21 bp, Homo sapiens
ccagataactygctctagcag

SEQ ID NO: 17702 - DNA, 21 bp, Homo sapiens
ttccttgtttrtagctctggg

SEQ ID NO: 17703 - DNA, 21 bp, Homo sapiens
ctgtcatggcrttctcagaga

SEQ ID NO: 17704 - DNA, 21 bp, Homo sapiens
ctctccattcrtggggtccct

SEQ ID NO: 17705 - DNA, 21 bp, Homo sapiens
agcctgcagarcccattggag

SEQ ID NO: 17706 - DNA, 21 bp, Homo sapiens
ctgtctcctgkgggtaggggg

SEQ ID NO: 17707 - DNA, 21 bp, Homo sapiens
aaatagccccrctgcagtcaa

SEQ ID NO: 17708 - DNA, 21 bp, Homo sapiens
tccagaaaggygccaaggggc

SEQ ID NO: 17709 - DNA, 21 bp, Homo sapiens
tgtaagacackaatcccatcc

SEQ ID NO: 17710 - DNA, 21 bp, Homo sapiens
aggaccactgytgtatatgtg

SEQ ID NO: 17711 - DNA, 21 bp, Homo sapiens
gccttctgctrtatatagtct

SEQ ID NO: 17712 - DNA, 21 bp, Homo sapiens
gccctcactcygctaccctct

SEQ ID NO: 17713 - DNA, 21 bp, Homo sapiens
ttcattacatmattgtttgaa

SEQ ID NO: 17714 - DNA, 21 bp, Homo sapiens
tatgcggagaygccctccttc

SEQ ID NO: 17715 - DNA, 21 bp, Homo sapiens
atccgtcatckcttgatcctc

SEQ ID NO: 17716 - DNA, 21 bp, Homo sapiens
cttgcactttygttttacact

SEQ ID NO: 17717 - DNA, 21 bp, Homo sapiens
cagtaagggaycctgcctgtg

SEQ ID NO: 17718 - DNA, 21 bp, Homo sapiens
caggaaatgtrtcctgtcccc

SEQ ID NO: 17719 - DNA, 21 bp, Homo sapiens
cctggactggrgccagcgtgg

SEQ ID NO: 17720 - DNA, 21 bp, Homo sapiens
tatatagacaratatttcaca

SEQ ID NO: 17721 - DNA, 21 bp, Homo sapiens
tccaaacagcrtgtagtttaa

SEQ ID NO: 17722 - DNA, 21 bp, Homo sapiens
tgcagctgccrgatggaatag

SEQ ID NO: 17723 - DNA, 21 bp, Homo sapiens
atgggcttggkgtttggtgcc

SEQ ID NO: 17724 - DNA, 21 bp, Homo sapiens
gtgatgcggcytcctagtaca

SEQ ID NO: 17725 - DNA, 21 bp, Homo sapiens
gggaaatgtgkactagccatg

SEQ ID NO: 17726 - DNA, 21 bp, Homo sapiens
aatggcttagrgatgatcatg

SEQ ID NO: 17727 - DNA, 21 bp, Homo sapiens
tctggatgaayggacttgatg

SEQ ID NO: 17728 - DNA, 21 bp, Homo sapiens
ccgacccaacytctagaccct

SEQ ID NO: 17729 - DNA, 21 bp, Homo sapiens
atgtggtaccmaaaaatccag

SEQ ID NO: 17730 - DNA, 21 bp, Homo sapiens
accagcttcayggaggagcag

SEQ ID NO: 17731 - DNA, 21 bp, Homo sapiens
ccatcacctgrccttttcctg

SEQ ID NO: 17732 - DNA, 21 bp, Homo sapiens
agtggggaaaktgttctacag

SEQ ID NO: 17733 - DNA, 21 bp, Homo sapiens
ctgaattcatrgtttccctct

SEQ ID NO: 17734 - DNA, 21 bp, Homo sapiens
tcacaaatatmgtgtcctcac

SEQ ID NO: 17735 - DNA, 21 bp, Homo sapiens
agaaaggcctrtaaccaaatg

SEQ ID NO: 17736 - DNA, 21 bp, Homo sapiens
gttaatacgayggtatagaaa

SEQ ID NO: 17737 - DNA, 21 bp, Homo sapiens
acaaggtctcrggcatacgcc

SEQ ID NO: 17738 - DNA, 21 bp, Homo sapiens
gcctcctgccrtgtgaagagg

SEQ ID NO: 17739 - DNA, 21 bp, Homo sapiens
catatatcttyataataatga

SEQ ID NO: 17740 - DNA, 21 bp, Homo sapiens
gttgtggggakagggtcacat

SEQ ID NO: 17741 - DNA, 21 bp, Homo sapiens
cagtaagatayggccagaact

SEQ ID NO: 17742 - DNA, 21 bp, Homo sapiens
gcgctggccayccccatccct

SEQ ID NO: 17743 - DNA, 21 bp, Homo sapiens
gtcagcaggartgcgaggtgg

SEQ ID NO: 17744 - DNA, 21 bp, Homo sapiens
agtccacaccycccctccagg

SEQ ID NO: 17745 - DNA, 21 bp, Homo sapiens
aactgctattmatttctatgt

SEQ ID NO: 17746 - DNA, 21 bp, Homo sapiens
ctttttgctcrgttgaaaata

SEQ ID NO: 17747 - DNA, 21 bp, Homo sapiens
cagccttttgygaaacatcct

SEQ ID NO: 17748 - DNA, 21 bp, Homo sapiens
tttcatgtccrtatcccactt

SEQ ID NO: 17749 - DNA, 21 bp, Homo sapiens
tcactggatayatattttatg

SEQ ID NO: 17750 - DNA, 21 bp, Homo sapiens
tggaatcattmgtggtctgtt

SEQ ID NO: 17751 - DNA, 21 bp, Homo sapiens
tgtttctaccygccagattgc

SEQ ID NO: 17752 - DNA, 21 bp, Homo sapiens
cccataccacygctgtatcca

SEQ ID NO: 17753 - DNA, 21 bp, Homo sapiens
ttgcttgcttycttctctgat

SEQ ID NO: 17754 - DNA, 21 bp, Homo sapiens
aagccctggckgtgtctatga

SEQ ID NO: 17755 - DNA, 21 bp, Homo sapiens
tcctgtgttcrtttgctcagg

SEQ ID NO: 17756 - DNA, 21 bp, Homo sapiens
cgtcagtctgyacactcccag

SEQ ID NO: 17757 - DNA, 21 bp, Homo sapiens
ttctggaacayggagtagaga

SEQ ID NO: 17758 - DNA, 21 bp, Homo sapiens
ttcctctctcytcttcatcag

SEQ ID NO: 17759 - DNA, 21 bp, Homo sapiens
ttttgtctctycatgagggat

SEQ ID NO: 17760 - DNA, 21 bp, Homo sapiens
ctagctctatrtttcccagag

SEQ ID NO: 17761 - DNA, 21 bp, Homo sapiens
tgtcccttccrtgccctttct

SEQ ID NO: 17762 - DNA, 21 bp, Homo sapiens
ccccagttgartctaatgtgc

SEQ ID NO: 17763 - DNA, 21 bp, Homo sapiens
ctgtgtcaggratttttgcta

SEQ ID NO: 17764 - DNA, 21 bp, Homo sapiens
ctctagaaccrtctgcagagc

SEQ ID NO: 17765 - DNA, 21 bp, Homo sapiens
ttacctcctartggatttgat

SEQ ID NO: 17766 - DNA, 21 bp, Homo sapiens
atccttgtttytccagtggcg

SEQ ID NO: 17767 - DNA, 21 bp, Homo sapiens
aacatcagggktattgctgtg

SEQ ID NO: 17768 - DNA, 21 bp, Homo sapiens
gtcagatgttraacttggagt

SEQ ID NO: 17769 - DNA, 21 bp, Homo sapiens
gctctgcagcktggtctgcgt

SEQ ID NO: 17770 - DNA, 21 bp, Homo sapiens
agtcctgggakcagccactaa

SEQ ID NO: 17771 - DNA, 21 bp, Homo sapiens
ttatttttatygtcacatctg

SEQ ID NO: 17772 - DNA, 21 bp, Homo sapiens
ccagcgatgcktacacttgga

SEQ ID NO: 17773 - DNA, 21 bp, Homo sapiens
agatgactgtrctctctttgt

SEQ ID NO: 17774 - DNA, 21 bp, Homo sapiens
taatagaaatkctgaaaaaaa

SEQ ID NO: 17775 - DNA, 21 bp, Homo sapiens
agatgaggtgractgtggtat

SEQ ID NO: 17776 - DNA, 21 bp, Homo sapiens
atatccactayacacaggcta

SEQ ID NO: 17777 - DNA, 21 bp, Homo sapiens
atagctcataracatcaggtc

SEQ ID NO: 17778 - DNA, 21 bp, Homo sapiens
tagtctctacrcagagtaact

SEQ ID NO: 17779 - DNA, 21 bp, Homo sapiens
gaggggtcatktcataaacac

SEQ ID NO: 17780 - DNA, 21 bp, Homo sapiens
tagggcatttrtatactagct

SEQ ID NO: 17781 - DNA, 21 bp, Homo sapiens
ccattcctggkctaggaaaaa

SEQ ID NO: 17782 - DNA, 21 bp, Homo sapiens
gcagtttatayctgcacctct

SEQ ID NO: 17783 - DNA, 21 bp, Homo sapiens
tggcgataccrcttactatag

SEQ ID NO: 17784 - DNA, 21 bp, Homo sapiens
tttaattctcrtaacaacctt

SEQ ID NO: 17785 - DNA, 21 bp, Homo sapiens
agactgttgtkcaggtgtttt

SEQ ID NO: 17786 - DNA, 21 bp, Homo sapiens
taaaatgactygttcaaatca

SEQ ID NO: 17787 - DNA, 21 bp, Homo sapiens
actgaggattmcaattttact

SEQ ID NO: 17788 - DNA, 21 bp, Homo sapiens
gtggaaaacartgacagactt

SEQ ID NO: 17789 - DNA, 21 bp, Homo sapiens
catctaaccayatgcctttat

SEQ ID NO: 17790 - DNA, 21 bp, Homo sapiens
atataccctcygcctaatcct

SEQ ID NO: 17791 - DNA, 21 bp, Homo sapiens
actgtaagaaygcttaggcaa

SEQ ID NO: 17792 - DNA, 21 bp, Homo sapiens
tccagacttayattgtcatag

SEQ ID NO: 17793 - DNA, 21 bp, Homo sapiens
tccatctgctrtacctctgac

SEQ ID NO: 17794 - DNA, 21 bp, Homo sapiens
ttgccctcagyagtacgcctt

SEQ ID NO: 17795 - DNA, 21 bp, Homo sapiens
ctacatagttycgcagtgtct

SEQ ID NO: 17796 - DNA, 21 bp, Homo sapiens
gttctacacakcttcatatta

SEQ ID NO: 17797 - DNA, 21 bp, Homo sapiens
ttatatgattmtgtagagaac

SEQ ID NO: 17798 - DNA, 21 bp, Homo sapiens
gctcataggartatcaattta

SEQ ID NO: 17799 - DNA, 21 bp, Homo sapiens
tgttgattackttaggctctg

SEQ ID NO: 17800 - DNA, 21 bp, Homo sapiens
agttcagcacyccatgggggg

SEQ ID NO: 17801 - DNA, 21 bp, Homo sapiens
cctcctccccmccaatctctg

SEQ ID NO: 17802 - DNA, 21 bp, Homo sapiens
atacataggtrcttcactcag

SEQ ID NO: 17803 - DNA, 21 bp, Homo sapiens
ggtgctctaarttggcttggg

SEQ ID NO: 17804 - DNA, 21 bp, Homo sapiens
ggtgggtaacrtagggcctac

SEQ ID NO: 17805 - DNA, 21 bp, Homo sapiens
gacggattgaytcagagctga

SEQ ID NO: 17806 - DNA, 21 bp, Homo sapiens
cagaaaccacrtgcttgagaa

SEQ ID NO: 17807 - DNA, 21 bp, Homo sapiens
ttaatataatktgttcctgtt

SEQ ID NO: 17808 - DNA, 21 bp, Homo sapiens
cattgggagcmtcagggaagg

SEQ ID NO: 17809 - DNA, 21 bp, Homo sapiens
gatctattcayacgatggaat

SEQ ID NO: 17810 - DNA, 21 bp, Homo sapiens
gcctatagcaygtctgcctca

SEQ ID NO: 17811 - DNA, 21 bp, Homo sapiens
gttgtagttcragttaccttt

SEQ ID NO: 17812 - DNA, 21 bp, Homo sapiens
ctaggacctcygtcaatatgt

SEQ ID NO: 17813 - DNA, 21 bp, Homo sapiens
tcattgaagaycttcttttat

SEQ ID NO: 17814 - DNA, 21 bp, Homo sapiens
gggctgctgtracaaccacac

SEQ ID NO: 17815 - DNA, 21 bp, Homo sapiens
caggacatatmatcttcgggg

SEQ ID NO: 17816 - DNA, 21 bp, Homo sapiens
cctttgccaartgaagaaggg

SEQ ID NO: 17817 - DNA, 21 bp, Homo sapiens
ggtgctatctkgaaaagagca

SEQ ID NO: 17818 - DNA, 21 bp, Homo sapiens
gtatttgctcrttaagacttt

SEQ ID NO: 17819 - DNA, 21 bp, Homo sapiens
ttggacttctkacttgatatg

SEQ ID NO: 17820 - DNA, 21 bp, Homo sapiens
tgaggaaatayacattttcca

SEQ ID NO: 17821 - DNA, 21 bp, Homo sapiens
aatggagattyaggcatcatc

SEQ ID NO: 17822 - DNA, 21 bp, Homo sapiens
cacccagatcmtatttaattt

SEQ ID NO: 17823 - DNA, 21 bp, Homo sapiens
cactacttagrttaaagagga

SEQ ID NO: 17824 - DNA, 21 bp, Homo sapiens
tagatgcaatkaaagaatgac

SEQ ID NO: 17825 - DNA, 21 bp, Homo sapiens
ggaggtgggtkgggggcagat

SEQ ID NO: 17826 - DNA, 21 bp, Homo sapiens
ctaaaatctayagaccctttg

SEQ ID NO: 17827 - DNA, 21 bp, Homo sapiens
gatcactatayttctgttact

SEQ ID NO: 17828 - DNA, 21 bp, Homo sapiens
tcaatgttatmtctctcctga

SEQ ID NO: 17829 - DNA, 21 bp, Homo sapiens
ctatatttggyggggcaggac

SEQ ID NO: 17830 - DNA, 21 bp, Homo sapiens
gaacccagccraggagtatga

SEQ ID NO: 17831 - DNA, 21 bp, Homo sapiens
ttagagctgtyttttattcca

SEQ ID NO: 17832 - DNA, 21 bp, Homo sapiens
taaaccagccrggtaagactc

SEQ ID NO: 17833 - DNA, 21 bp, Homo sapiens
tgttcttataygcccattact

SEQ ID NO: 17834 - DNA, 21 bp, Homo sapiens
catggacctcrttgttttcct

SEQ ID NO: 17835 - DNA, 21 bp, Homo sapiens
caagagcagcmggaaagagaa

SEQ ID NO: 17836 - DNA, 21 bp, Homo sapiens
ggccttccagraagaagggga

SEQ ID NO: 17837 - DNA, 21 bp, Homo sapiens
cacagcgatcrtgattcccac

SEQ ID NO: 17838 - DNA, 21 bp, Homo sapiens
cccaattcaayttgtcctgcc

SEQ ID NO: 17839 - DNA, 21 bp, Homo sapiens
gtctcgctgcyacatggtgtt

SEQ ID NO: 17840 - DNA, 21 bp, Homo sapiens
gattgtgagcytggggaatat

SEQ ID NO: 17841 - DNA, 21 bp, Homo sapiens
gctggtaatgrttagaaatcc

SEQ ID NO: 17842 - DNA, 21 bp, Homo sapiens
tcacatggccyttgttgttgt

SEQ ID NO: 17843 - DNA, 21 bp, Homo sapiens
ttctaactggmacagcacacc

SEQ ID NO: 17844 - DNA, 21 bp, Homo sapiens
ctgatgtactrtattgtatcc

SEQ ID NO: 17845 - DNA, 21 bp, Homo sapiens
ggcccaaggargtgaaatttt

SEQ ID NO: 17846 - DNA, 21 bp, Homo sapiens
acatttagtcyccttgtgtgt

SEQ ID NO: 17847 - DNA, 21 bp, Homo sapiens
ttatttagtaytttttgcaag

SEQ ID NO: 17848 - DNA, 21 bp, Homo sapiens
tttcaaatgcrttctcttagt

SEQ ID NO: 17849 - DNA, 21 bp, Homo sapiens
aaaataagacrgtgtataagt

SEQ ID NO: 17850 - DNA, 21 bp, Homo sapiens
aaatgcttctycttcaaattg

SEQ ID NO: 17851 - DNA, 21 bp, Homo sapiens
aaaatataacmggtaatgaat

SEQ ID NO: 17852 - DNA, 21 bp, Homo sapiens
tttttaatgtyccatgttttt

SEQ ID NO: 17853 - DNA, 21 bp, Homo sapiens
gtcaattcagygagaagaaaa

SEQ ID NO: 17854 - DNA, 21 bp, Homo sapiens
gacagttccgytatacacacc

SEQ ID NO: 17855 - DNA, 21 bp, Homo sapiens
atgaaagaggrgcagagtgtg

SEQ ID NO: 17856 - DNA, 21 bp, Homo sapiens
ctgcttttctygattcagata

SEQ ID NO: 17857 - DNA, 21 bp, Homo sapiens
aattattactrcctttattat

SEQ ID NO: 17858 - DNA, 21 bp, Homo sapiens
acacatacccrtttttttata

SEQ ID NO: 17859 - DNA, 21 bp, Homo sapiens
actccaggttrtaatgttttg

SEQ ID NO: 17860 - DNA, 21 bp, Homo sapiens
tacactttcaygtctatgtct

SEQ ID NO: 17861 - DNA, 21 bp, Homo sapiens
ggcaactaggrttatttgttt

SEQ ID NO: 17862 - DNA, 21 bp, Homo sapiens
tttctgtgaaytttttgaagt

SEQ ID NO: 17863 - DNA, 21 bp, Homo sapiens
gtttgtaacayatgtagaagt

SEQ ID NO: 17864 - DNA, 21 bp, Homo sapiens
gttcttgggayagtgagttag

SEQ ID NO: 17865 - DNA, 21 bp, Homo sapiens
cagtgagtagrtggaatactg

SEQ ID NO: 17866 - DNA, 21 bp, Homo sapiens
cccacctgccrgagaagatga

SEQ ID NO: 17867 - DNA, 21 bp, Homo sapiens
ccaggctttayctgtatcact

SEQ ID NO: 17868 - DNA, 21 bp, Homo sapiens
gggaacagaamagagctgtgt

SEQ ID NO: 17869 - DNA, 21 bp, Homo sapiens
aataatgagaraagaagcaat

SEQ ID NO: 17870 - DNA, 21 bp, Homo sapiens
ggctgtgaacytctaaatgct

SEQ ID NO: 17871 - DNA, 21 bp, Homo sapiens
ggtacaatttkattattccca

SEQ ID NO: 17872 - DNA, 21 bp, Homo sapiens
acatatgtgcrtgtattaggg

SEQ ID NO: 17873 - DNA, 21 bp, Homo sapiens
cttaaccaccygcattccatc

SEQ ID NO: 17874 - DNA, 21 bp, Homo sapiens
aaataagtgakaattcattgg

SEQ ID NO: 17875 - DNA, 21 bp, Homo sapiens
cctcccagtamacccaccttc

SEQ ID NO: 17876 - DNA, 21 bp, Homo sapiens
ctctacctacygcacagataa

SEQ ID NO: 17877 - DNA, 21 bp, Homo sapiens
gtgcctgcacyctgggaactg

SEQ ID NO: 17878 - DNA, 21 bp, Homo sapiens
ctctgtgtggmtgcggagtct

SEQ ID NO: 17879 - DNA, 21 bp, Homo sapiens
taaattaagtrtttatttcaa

SEQ ID NO: 17880 - DNA, 21 bp, Homo sapiens
ccctccctccyccagaagcct

SEQ ID NO: 17881 - DNA, 21 bp, Homo sapiens
gtcccaggacrtgcaggagga

SEQ ID NO: 17882 - DNA, 21 bp, Homo sapiens
gacgtgacccygtcctcagag

SEQ ID NO: 17883 - DNA, 21 bp, Homo sapiens
ccctggaggayactgctggac

SEQ ID NO: 17884 - DNA, 21 bp, Homo sapiens
aaccgaccccyggcccacgtc

SEQ ID NO: 17885 - DNA, 21 bp, Homo sapiens
aggactatggkgtgcaggggc

SEQ ID NO: 17886 - DNA, 21 bp, Homo sapiens
caaggaagtargggaggtggg

SEQ ID NO: 17887 - DNA, 21 bp, Homo sapiens
cgctttctagytctttgatcc

SEQ ID NO: 17888 - DNA, 21 bp, Homo sapiens
ctctctccctratgtgctgtg

SEQ ID NO: 17889 - DNA, 21 bp, Homo sapiens
agaggtgtggkgaagactcct

SEQ ID NO: 17890 - DNA, 21 bp, Homo sapiens
attactatctmaccaagctgg

SEQ ID NO: 17891 - DNA, 21 bp, Homo sapiens
acttccacaayagatgttccc

SEQ ID NO: 17892 - DNA, 21 bp, Homo sapiens
acaagtaatgrtcatactcac

SEQ ID NO: 17893 - DNA, 21 bp, Homo sapiens
tccctgctatkgcctgatcat

SEQ ID NO: 17894 - DNA, 21 bp, Homo sapiens
aaactctgcargagctgtgaa

SEQ ID NO: 17895 - DNA, 21 bp, Homo sapiens
gtacagaaacraatccgtaag

SEQ ID NO: 17896 - DNA, 21 bp, Homo sapiens
gtgggaactgrtggaaagaat

SEQ ID NO: 17897 - DNA, 21 bp, Homo sapiens
aaagttctaayagattagggg

SEQ ID NO: 17898 - DNA, 21 bp, Homo sapiens
ctggtttccaragtgatagag

SEQ ID NO: 17899 - DNA, 21 bp, Homo sapiens
gcatgcaccaycatgcctggc

SEQ ID NO: 17900 - DNA, 21 bp, Homo sapiens
tcctctcccamggctctctcc

SEQ ID NO: 17901 - DNA, 21 bp, Homo sapiens
ggcagtcacarttgtgtgagg

SEQ ID NO: 17902 - DNA, 21 bp, Homo sapiens
gtggagctggrcttctaacca

SEQ ID NO: 17903 - DNA, 21 bp, Homo sapiens
ccattttaaarttgggtcatc

SEQ ID NO: 17904 - DNA, 21 bp, Homo sapiens
cctgttcatcycctgtgggga

SEQ ID NO: 17905 - DNA, 21 bp, Homo sapiens
agtgagtgagmtagaagtttc

SEQ ID NO: 17906 - DNA, 21 bp, Homo sapiens
ccgaagttccyggtggggaga

SEQ ID NO: 17907 - DNA, 21 bp, Homo sapiens
tgtagtgggaygaaatgaggg

SEQ ID NO: 17908 - DNA, 21 bp, Homo sapiens
cttggcagttrgaaaatgttt

SEQ ID NO: 17909 - DNA, 21 bp, Homo sapiens
gtccaagaccmccgtgcctgt

SEQ ID NO: 17910 - DNA, 21 bp, Homo sapiens
taaacatgatytcatcccccc

SEQ ID NO: 17911 - DNA, 21 bp, Homo sapiens
gttacggcccktcattggctt

SEQ ID NO: 17912 - DNA, 21 bp, Homo sapiens
attccactctmtccatctgtg

SEQ ID NO: 17913 - DNA, 21 bp, Homo sapiens
gaagcagcccyctacattcaa

SEQ ID NO: 17914 - DNA, 21 bp, Homo sapiens
tggtggatgtrtgggtaactc

SEQ ID NO: 17915 - DNA, 21 bp, Homo sapiens
aatagtgtctrtctcgtacaa

SEQ ID NO: 17916 - DNA, 21 bp, Homo sapiens
atttaaggggyaaaaatgaca

SEQ ID NO: 17917 - DNA, 21 bp, Homo sapiens
ggaaatgtgcygcaccgtatt

SEQ ID NO: 17918 - DNA, 21 bp, Homo sapiens
tcacttgaaayctcagcccta

SEQ ID NO: 17919 - DNA, 21 bp, Homo sapiens
tctttagaaaygcagattctc

SEQ ID NO: 17920 - DNA, 21 bp, Homo sapiens
agcagctccartcctgtaaat

SEQ ID NO: 17921 - DNA, 21 bp, Homo sapiens
acgcaaccaaytggactcagc

SEQ ID NO: 17922 - DNA, 21 bp, Homo sapiens
acctgttgcakaattttgacc

SEQ ID NO: 17923 - DNA, 21 bp, Homo sapiens
caatgtgtagygaatcaataa

SEQ ID NO: 17924 - DNA, 21 bp, Homo sapiens
tacagagaggrgagttggagg

SEQ ID NO: 17925 - DNA, 21 bp, Homo sapiens
ttcatccacaygtctatgtaa

SEQ ID NO: 17926 - DNA, 21 bp, Homo sapiens
aaatgtactamttttgtaatt

SEQ ID NO: 17927 - DNA, 21 bp, Homo sapiens
gtatgtgcatrgctttctctt

SEQ ID NO: 17928 - DNA, 21 bp, Homo sapiens
tataaatggartcatactgta

SEQ ID NO: 17929 - DNA, 21 bp, Homo sapiens
ttttcaggcaygagatcactc

SEQ ID NO: 17930 - DNA, 21 bp, Homo sapiens
gcttgcagtayatttggaaag

SEQ ID NO: 17931 - DNA, 21 bp, Homo sapiens
tttaaagtgcrtcagtttagt

SEQ ID NO: 17932 - DNA, 21 bp, Homo sapiens
ggttatgaaayagaaccatac

SEQ ID NO: 17933 - DNA, 21 bp, Homo sapiens
acatgatgtgyaccagccagc

SEQ ID NO: 17934 - DNA, 21 bp, Homo sapiens
tgtagtgaacrctatgaagga

SEQ ID NO: 17935 - DNA, 21 bp, Homo sapiens
tgaatggcaaygtgcaaaggt

SEQ ID NO: 17936 - DNA, 21 bp, Homo sapiens
ggatcttgtgrtcagcacaca

SEQ ID NO: 17937 - DNA, 21 bp, Homo sapiens
ttaaggatgarcagaggcaga

SEQ ID NO: 17938 - DNA, 21 bp, Homo sapiens
gcccctgtccrggtttatggg

SEQ ID NO: 17939 - DNA, 21 bp, Homo sapiens
acaggctcccytgctggacaa

SEQ ID NO: 17940 - DNA, 21 bp, Homo sapiens
tcttactttgytcttgttaaa

SEQ ID NO: 17941 - DNA, 21 bp, Homo sapiens
agcaacttackgaaggtcatg

SEQ ID NO: 17942 - DNA, 21 bp, Homo sapiens
ttacttgcagytataaaagcc

SEQ ID NO: 17943 - DNA, 21 bp, Homo sapiens
aaaaaacacayatatatatat

SEQ ID NO: 17944 - DNA, 21 bp, Homo sapiens
ggctaaaaatytggaagttga

SEQ ID NO: 17945 - DNA, 21 bp, Homo sapiens
aagctcatacyagatctttct

SEQ ID NO: 17946 - DNA, 21 bp, Homo sapiens
acatttttctktccttccttc

SEQ ID NO: 17947 - DNA, 21 bp, Homo sapiens
agaccttagtmaatgctgggc

SEQ ID NO: 17948 - DNA, 21 bp, Homo sapiens
cagcagctccrgcaagtacct

SEQ ID NO: 17949 - DNA, 21 bp, Homo sapiens
agccaggaaaygggctctcac

SEQ ID NO: 17950 - DNA, 21 bp, Homo sapiens
tatttctaacrtttaagggac

SEQ ID NO: 17951 - DNA, 21 bp, Homo sapiens
ccctttggccrttagtcccgg

SEQ ID NO: 17952 - DNA, 21 bp, Homo sapiens
acataaacatmccatggtgaa

SEQ ID NO: 17953 - DNA, 21 bp, Homo sapiens
gaaatgctgcktctctaaatg

SEQ ID NO: 17954 - DNA, 21 bp, Homo sapiens
gattgaaatgkcatggcccag

SEQ ID NO: 17955 - DNA, 21 bp, Homo sapiens
tcccctgttayttacttttta

SEQ ID NO: 17956 - DNA, 21 bp, Homo sapiens
tgaataaatgyacactctatt

SEQ ID NO: 17957 - DNA, 21 bp, Homo sapiens
cgggttttatygtttaaaaat

SEQ ID NO: 17958 - DNA, 21 bp, Homo sapiens
tggtaaacctytactcaagaa

SEQ ID NO: 17959 - DNA, 21 bp, Homo sapiens
ccgagtatggyattgcaaaaa

SEQ ID NO: 17960 - DNA, 21 bp, Homo sapiens
gtcagctgtamttatcctaca

SEQ ID NO: 17961 - DNA, 21 bp, Homo sapiens
tctgaaacgcyaccctaagac

SEQ ID NO: 17962 - DNA, 21 bp, Homo sapiens
attagaaggcmtcctagacac

SEQ ID NO: 17963 - DNA, 21 bp, Homo sapiens
tgtcaagttcygaatgaaatc

SEQ ID NO: 17964 - DNA, 21 bp, Homo sapiens
ctgttccttgrtagaactaaa

SEQ ID NO: 17965 - DNA, 21 bp, Homo sapiens
tttgctcaacraggtgatgaa

SEQ ID NO: 17966 - DNA, 21 bp, Homo sapiens
ccacttggtcrtgatacattg

SEQ ID NO: 17967 - DNA, 21 bp, Homo sapiens
gcttgaaatgygtgggttcac

SEQ ID NO: 17968 - DNA, 21 bp, Homo sapiens
ctacgggacarggaatacata

SEQ ID NO: 17969 - DNA, 21 bp, Homo sapiens
gctgcattgcrtttcaaagct

SEQ ID NO: 17970 - DNA, 21 bp, Homo sapiens
ctatcaatttyttccatatgc

SEQ ID NO: 17971 - DNA, 21 bp, Homo sapiens
caacgtagctrctctcagact

SEQ ID NO: 17972 - DNA, 21 bp, Homo sapiens
ccagtaagtgragaagtcaga

SEQ ID NO: 17973 - DNA, 21 bp, Homo sapiens
attgaacttgrgctccatttt

SEQ ID NO: 17974 - DNA, 21 bp, Homo sapiens
agtataggccragaagaaacc

SEQ ID NO: 17975 - DNA, 21 bp, Homo sapiens
acagttgtgtrggttactttg

SEQ ID NO: 17976 - DNA, 21 bp, Homo sapiens
cagtgaccaamctgctgtgct

SEQ ID NO: 17977 - DNA, 21 bp, Homo sapiens
atcaatagttrtcagggagtt

SEQ ID NO: 17978 - DNA, 21 bp, Homo sapiens
tacttactaakcatctactat

SEQ ID NO: 17979 - DNA, 21 bp, Homo sapiens
ttttacatccrtctttatggc

SEQ ID NO: 17980 - DNA, 21 bp, Homo sapiens
cacgtgcagcraaagaggaga

SEQ ID NO: 17981 - DNA, 21 bp, Homo sapiens
gagttagccargactgtggac

SEQ ID NO: 17982 - DNA, 21 bp, Homo sapiens
gttcacataaygcacacaaat

SEQ ID NO: 17983 - DNA, 21 bp, Homo sapiens
aaggatttgayggagaaggaa

SEQ ID NO: 17984 - DNA, 21 bp, Homo sapiens
agcacacgctkatcttccgcc

SEQ ID NO: 17985 - DNA, 21 bp, Homo sapiens
caaggtctagyggatggagtt

SEQ ID NO: 17986 - DNA, 21 bp, Homo sapiens
ggggaaacacmggacattgag

SEQ ID NO: 17987 - DNA, 21 bp, Homo sapiens
taccaattctmaagggtctaa

SEQ ID NO: 17988 - DNA, 21 bp, Homo sapiens
gaagccctaaycaccccctcc

SEQ ID NO: 17989 - DNA, 21 bp, Homo sapiens
tattgggaagrggcactgggg

SEQ ID NO: 17990 - DNA, 21 bp, Homo sapiens
tgtttgattcyagtttggata

SEQ ID NO: 17991 - DNA, 21 bp, Homo sapiens
tgacaggcccytgatgaagta

SEQ ID NO: 17992 - DNA, 21 bp, Homo sapiens
ttatgcctccytcaagaattt

SEQ ID NO: 17993 - DNA, 21 bp, Homo sapiens
tttccttatayagcagataaa

SEQ ID NO: 17994 - DNA, 21 bp, Homo sapiens
tttgacaatartggctatgaa

SEQ ID NO: 17995 - DNA, 21 bp, Homo sapiens
actttcagacrtttgggatgg

SEQ ID NO: 17996 - DNA, 21 bp, Homo sapiens
acaaacacaargagtgaaatc

SEQ ID NO: 17997 - DNA, 21 bp, Homo sapiens
gtggctgtaaraagctgtgga

SEQ ID NO: 17998 - DNA, 21 bp, Homo sapiens
atcatcatcamcatcatcaat

SEQ ID NO: 17999 - DNA, 21 bp, Homo sapiens
acgtgtgcaaygcagtgtaga

SEQ ID NO: 18000 - DNA, 21 bp, Homo sapiens
atgaagacatmcgttcccctt

SEQ ID NO: 18001 - DNA, 21 bp, Homo sapiens
gcgaggggggyatgagctctt

SEQ ID NO: 18002 - DNA, 21 bp, Homo sapiens
catgatctacyacagatggta

SEQ ID NO: 18003 - DNA, 21 bp, Homo sapiens
agaataccacytcttcagcat

SEQ ID NO: 18004 - DNA, 21 bp, Homo sapiens
attgtagtaayatttgtaata

SEQ ID NO: 18005 - DNA, 21 bp, Homo sapiens
cagggatgccrgactcatcaa

SEQ ID NO: 18006 - DNA, 21 bp, Homo sapiens
tgagctgctamtgatttcctt

SEQ ID NO: 18007 - DNA, 21 bp, Homo sapiens
atcgggcaggktgattaggag

SEQ ID NO: 18008 - DNA, 21 bp, Homo sapiens
cacaaaccaarcccatggacc

SEQ ID NO: 18009 - DNA, 21 bp, Homo sapiens
ctttgtgatcytctgagggag

SEQ ID NO: 18010 - DNA, 21 bp, Homo sapiens
gatggggcagrtgccttgatt

SEQ ID NO: 18011 - DNA, 21 bp, Homo sapiens
gccccagcctkgtgttcccat

SEQ ID NO: 18012 - DNA, 21 bp, Homo sapiens
cagtggtgcgyttttgaattt

SEQ ID NO: 18013 - DNA, 21 bp, Homo sapiens
agccgggtcckcaggcactcg

SEQ ID NO: 18014 - DNA, 21 bp, Homo sapiens
aaaatctccayctgagtccaa

SEQ ID NO: 18015 - DNA, 21 bp, Homo sapiens
tcagactcacrtgaacgggct

SEQ ID NO: 18016 - DNA, 21 bp, Homo sapiens
cttgctttacygcagcaccag

SEQ ID NO: 18017 - DNA, 21 bp, Homo sapiens
aaaaattcccrggagggagat

SEQ ID NO: 18018 - DNA, 21 bp, Homo sapiens
ccactgggccygatggggttg

SEQ ID NO: 18019 - DNA, 21 bp, Homo sapiens
ctggcctcctygttgatgttt

SEQ ID NO: 18020 - DNA, 21 bp, Homo sapiens
ttttcccaggmttttagtaga

SEQ ID NO: 18021 - DNA, 21 bp, Homo sapiens
tgatgtccagkgaatcttcat

SEQ ID NO: 18022 - DNA, 21 bp, Homo sapiens
gagcacagggycagggctggg

SEQ ID NO: 18023 - DNA, 21 bp, Homo sapiens
tcaggtagcayagtgaaaaac

SEQ ID NO: 18024 - DNA, 21 bp, Homo sapiens
cagagttggcmgtggctgcag

SEQ ID NO: 18025 - DNA, 21 bp, Homo sapiens
ctccaaacgtyaaggcgtctt

SEQ ID NO: 18026 - DNA, 21 bp, Homo sapiens
agctgaggtgrccgcagatgg

SEQ ID NO: 18027 - DNA, 21 bp, Homo sapiens
gggactccagrggccagaatg

SEQ ID NO: 18028 - DNA, 21 bp, Homo sapiens
cagagacggtmggaatcactg

SEQ ID NO: 18029 - DNA, 21 bp, Homo sapiens
taggagagatrggtgtgggca

SEQ ID NO: 18030 - DNA, 21 bp, Homo sapiens
  MISC_FEATURE 11: n is a, c, g, or t
aggtgatgaanagaacgtgga

SEQ ID NO: 18031 - DNA, 21 bp, Homo sapiens
tgaagtcgatragggaaccct

SEQ ID NO: 18032 - DNA, 21 bp, Homo sapiens
cggagtttccmggctaacaca

SEQ ID NO: 18033 - DNA, 21 bp, Homo sapiens
aggaaagccartggggtgtcg

SEQ ID NO: 18034 - DNA, 21 bp, Homo sapiens
gacaccgcacrgtaagcagat

SEQ ID NO: 18035 - DNA, 21 bp, Homo sapiens
gcccgggattytgtatttgac

SEQ ID NO: 18036 - DNA, 21 bp, Homo sapiens
agacccaaaayataagaagcc

SEQ ID NO: 18037 - DNA, 21 bp, Homo sapiens
ttgttgttttyagttgtttgg

SEQ ID NO: 18038 - DNA, 21 bp, Homo sapiens
ggcatcccagycgctgtgccc

SEQ ID NO: 18039 - DNA, 21 bp, Homo sapiens
ccttcaacccrggggtggtga

SEQ ID NO: 18040 - DNA, 21 bp, Homo sapiens
ctggacatgaygaatcagaat

SEQ ID NO: 18041 - DNA, 21 bp, Homo sapiens
ccagggctgaraccgctggtc

SEQ ID NO: 18042 - DNA, 21 bp, Homo sapiens
cacatattgaygtattacgcc

SEQ ID NO: 18043 - DNA, 21 bp, Homo sapiens
tctctcagctrttaatgtttc

SEQ ID NO: 18044 - DNA, 21 bp, Homo sapiens
gtgagtcttcyttcataccaa

SEQ ID NO: 18045 - DNA, 21 bp, Homo sapiens
gattttttaarattggcaaat

SEQ ID NO: 18046 - DNA, 21 bp, Homo sapiens
ttgttaatgtyaatataatgc

SEQ ID NO: 18047 - DNA, 21 bp, Homo sapiens
cctgtaacaaygtacatttgt

SEQ ID NO: 18048 - DNA, 21 bp, Homo sapiens
ggggctttaaraacatcttct

SEQ ID NO: 18049 - DNA, 21 bp, Homo sapiens
tgagtctttakacttagggaa

SEQ ID NO: 18050 - DNA, 21 bp, Homo sapiens
tcttctacttrttctccttca

SEQ ID NO: 18051 - DNA, 21 bp, Homo sapiens
ttgccagtaarttttttctta

SEQ ID NO: 18052 - DNA, 21 bp, Homo sapiens
aatggggacaygtcaaaaaga

SEQ ID NO: 18053 - DNA, 21 bp, Homo sapiens
ggcctagggcrggcttcctgc

SEQ ID NO: 18054 - DNA, 21 bp, Homo sapiens
tgcaattaccrtatttcatca

SEQ ID NO: 18055 - DNA, 21 bp, Homo sapiens
gagaaggaatktttcctcctt

SEQ ID NO: 18056 - DNA, 21 bp, Homo sapiens
cccttgctttmcagaattcaa

SEQ ID NO: 18057 - DNA, 21 bp, Homo sapiens
gagtgtgagcraggaaagtgg

SEQ ID NO: 18058 - DNA, 21 bp, Homo sapiens
ttgcctctctyctcgggtggg

SEQ ID NO: 18059 - DNA, 21 bp, Homo sapiens
ttgtttaaccyccttcctgcg

SEQ ID NO: 18060 - DNA, 21 bp, Homo sapiens
aggcagatgcrgcggccaaga

SEQ ID NO: 18061 - DNA, 21 bp, Homo sapiens
cagctggcagraatgacatgg

SEQ ID NO: 18062 - DNA, 21 bp, Homo sapiens
agctttaaccrctgcatgcag

SEQ ID NO: 18063 - DNA, 21 bp, Homo sapiens
agggagtgccrtgcggggcag

SEQ ID NO: 18064 - DNA, 21 bp, Homo sapiens
tcctgggccaygggaaacagc

SEQ ID NO: 18065 - DNA, 21 bp, Homo sapiens
gactcttcagrccggcagtgt

SEQ ID NO: 18066 - DNA, 21 bp, Homo sapiens
tcaaatcctgrccacttactt

SEQ ID NO: 18067 - DNA, 21 bp, Homo sapiens
agatggggccrttctttactc

SEQ ID NO: 18068 - DNA, 21 bp, Homo sapiens
gctttgccccrtagaatcatc

SEQ ID NO: 18069 - DNA, 21 bp, Homo sapiens
aggctttgccytttcatctat

SEQ ID NO: 18070 - DNA, 21 bp, Homo sapiens
ggatggatcartgaattatgg

SEQ ID NO: 18071 - DNA, 21 bp, Homo sapiens
attgaatgaarctggttttgg

SEQ ID NO: 18072 - DNA, 21 bp, Homo sapiens
tctcagcagamaggggattgg

SEQ ID NO: 18073 - DNA, 21 bp, Homo sapiens
cacacgtgttygcatggattt

SEQ ID NO: 18074 - DNA, 21 bp, Homo sapiens
ctggttctatrcagtcacgca

SEQ ID NO: 18075 - DNA, 21 bp, Homo sapiens
cgagacatgtyctttctgtcc

SEQ ID NO: 18076 - DNA, 21 bp, Homo sapiens
agaagaatccmgaaaaccaca

SEQ ID NO: 18077 - DNA, 21 bp, Homo sapiens
gaggcaggagmactgggggcc

SEQ ID NO: 18078 - DNA, 21 bp, Homo sapiens
gagagctgtgytgtgttcagg

SEQ ID NO: 18079 - DNA, 21 bp, Homo sapiens
cctctctcccmctccccgctt

SEQ ID NO: 18080 - DNA, 21 bp, Homo sapiens
cccgaagaccygccccttccc

SEQ ID NO: 18081 - DNA, 21 bp, Homo sapiens
caagattgccrtggcatccga

SEQ ID NO: 18082 - DNA, 21 bp, Homo sapiens
tgaccacatayacctaaatcc

SEQ ID NO: 18083 - DNA, 21 bp, Homo sapiens
tgtcccctaaytgattggcat

SEQ ID NO: 18084 - DNA, 21 bp, Homo sapiens
gggcctctagkatcagagcgg

SEQ ID NO: 18085 - DNA, 21 bp, Homo sapiens
acagaagaggytaaagtgggc

SEQ ID NO: 18086 - DNA, 21 bp, Homo sapiens
ggtagctggaytttttacctg

SEQ ID NO: 18087 - DNA, 21 bp, Homo sapiens
tagtggctatktgctcttggc

SEQ ID NO: 18088 - DNA, 21 bp, Homo sapiens
gcttggctctrccctgggtat

SEQ ID NO: 18089 - DNA, 21 bp, Homo sapiens
agaaatgtatyatcagaccat

SEQ ID NO: 18090 - DNA, 21 bp, Homo sapiens
tccccttcccrccagcttgcg

SEQ ID NO: 18091 - DNA, 21 bp, Homo sapiens
agcacacacgyacacagaaca

SEQ ID NO: 18092 - DNA, 21 bp, Homo sapiens
agtgggagggygtggaagccc

SEQ ID NO: 18093 - DNA, 21 bp, Homo sapiens
gacagatcacrtaaaagtatt

SEQ ID NO: 18094 - DNA, 21 bp, Homo sapiens
gcaagctctgygagaagccag

SEQ ID NO: 18095 - DNA, 21 bp, Homo sapiens
tgtggaggaaygagggctcgt

SEQ ID NO: 18096 - DNA, 21 bp, Homo sapiens
actagagggakgggacttttg

SEQ ID NO: 18097 - DNA, 21 bp, Homo sapiens
tgcaggtagayctttcctttg

SEQ ID NO: 18098 - DNA, 21 bp, Homo sapiens
gtgaaaacgayttgtacaccc

SEQ ID NO: 18099 - DNA, 21 bp, Homo sapiens
attattatccygttttacaga

SEQ ID NO: 18100 - DNA, 21 bp, Homo sapiens
agtgaggagaragggagcagg

SEQ ID NO: 18101 - DNA, 21 bp, Homo sapiens
gcagaggggaraggaaggtgg

SEQ ID NO: 18102 - DNA, 21 bp, Homo sapiens
ctttttaaaartgataactat

SEQ ID NO: 18103 - DNA, 21 bp, Homo sapiens
ttacctacgargcaagaggaa

SEQ ID NO: 18104 - DNA, 21 bp, Homo sapiens
gatgtcattgrggaaggtaaa

SEQ ID NO: 18105 - DNA, 21 bp, Homo sapiens
gagagcaagamggaaacaaat

SEQ ID NO: 18106 - DNA, 21 bp, Homo sapiens
ccaaaataacyacctgccatt

SEQ ID NO: 18107 - DNA, 21 bp, Homo sapiens
agctgagcacrtgaaaaaaag

SEQ ID NO: 18108 - DNA, 21 bp, Homo sapiens
gaaggagttgmagaatccaga

SEQ ID NO: 18109 - DNA, 21 bp, Homo sapiens
tgctgttaacrttcagcttcg

SEQ ID NO: 18110 - DNA, 21 bp, Homo sapiens
taaatattgaygattttgtta

SEQ ID NO: 18111 - DNA, 21 bp, Homo sapiens
agacaaaagtrggaaactttc

SEQ ID NO: 18112 - DNA, 21 bp, Homo sapiens
ggatgtcggcrcagtcttggg

SEQ ID NO: 18113 - DNA, 21 bp, Homo sapiens
gtattataaaycaactcatgt

SEQ ID NO: 18114 - DNA, 21 bp, Homo sapiens
accacacctcrttgcaaggga

SEQ ID NO: 18115 - DNA, 21 bp, Homo sapiens
ccctttcatgmtgaagaagcc

SEQ ID NO: 18116 - DNA, 21 bp, Homo sapiens
catgtatttcygccctctgac

SEQ ID NO: 18117 - DNA, 21 bp, Homo sapiens
tgagaaattgkgatatgaagg

SEQ ID NO: 18118 - DNA, 21 bp, Homo sapiens
tttgaaggctrcaaattacta

SEQ ID NO: 18119 - DNA, 21 bp, Homo sapiens
aaagataattytgatttgctt

SEQ ID NO: 18120 - DNA, 21 bp, Homo sapiens
catgtgtcttyttccacccat

SEQ ID NO: 18121 - DNA, 21 bp, Homo sapiens
tgaatggagaycccaaggggc

SEQ ID NO: 18122 - DNA, 21 bp, Homo sapiens
gtgaatgacarttagtcctat

SEQ ID NO: 18123 - DNA, 21 bp, Homo sapiens
gccatcagccrcccacttcac

SEQ ID NO: 18124 - DNA, 21 bp, Homo sapiens
attatggtacrgtcatgggca

SEQ ID NO: 18125 - DNA, 21 bp, Homo sapiens
aatgttaaatyctttcatcta

SEQ ID NO: 18126 - DNA, 21 bp, Homo sapiens
catgaacagcrcaagaaaaag

SEQ ID NO: 18127 - DNA, 21 bp, Homo sapiens
cttctgactcraaattttctg

SEQ ID NO: 18128 - DNA, 21 bp, Homo sapiens
gatctgctttrtaatttcgaa

SEQ ID NO: 18129 - DNA, 21 bp, Homo sapiens
acttcctgctraggctggcat

SEQ ID NO: 18130 - DNA, 21 bp, Homo sapiens
aaactccaacycctttatcct

SEQ ID NO: 18131 - DNA, 21 bp, Homo sapiens
gctctctgccyggctgagagg

SEQ ID NO: 18132 - DNA, 21 bp, Homo sapiens
cagctggaccygtcacacgct

SEQ ID NO: 18133 - DNA, 21 bp, Homo sapiens
ttgttcccctrtgtcctcgtc

SEQ ID NO: 18134 - DNA, 21 bp, Homo sapiens
tttggaaactrattagacagt

SEQ ID NO: 18135 - DNA, 21 bp, Homo sapiens
agcactcctcyccagtcctga

SEQ ID NO: 18136 - DNA, 21 bp, Homo sapiens
tcacccgcccrggccctgcac

SEQ ID NO: 18137 - DNA, 21 bp, Homo sapiens
gagactccacyctgttcccag

SEQ ID NO: 18138 - DNA, 21 bp, Homo sapiens
atacggccacygcctctgcgc

SEQ ID NO: 18139 - DNA, 21 bp, Homo sapiens
cagtgaggccycttggtcccc

SEQ ID NO: 18140 - DNA, 21 bp, Homo sapiens
catgtgaataygagtgtgtgc

SEQ ID NO: 18141 - DNA, 21 bp, Homo sapiens
ccaccttctcrtacacaccct

SEQ ID NO: 18142 - DNA, 21 bp, Homo sapiens
accagcgcagyacaagcatca

SEQ ID NO: 18143 - DNA, 21 bp, Homo sapiens
ctgggatccayggaaggggct

SEQ ID NO: 18144 - DNA, 21 bp, Homo sapiens
agaggttgagygactagttca

SEQ ID NO: 18145 - DNA, 21 bp, Homo sapiens
ggatctgccckactctcaggt

SEQ ID NO: 18146 - DNA, 21 bp, Homo sapiens
cccaagaaggytggaggcaaa

SEQ ID NO: 18147 - DNA, 21 bp, Homo sapiens
cacagctggcygttcaaaccc

SEQ ID NO: 18148 - DNA, 21 bp, Homo sapiens
gttgggaaaayggggcatgct

SEQ ID NO: 18149 - DNA, 21 bp, Homo sapiens
aacagatcgcrgtgtggtcag

SEQ ID NO: 18150 - DNA, 21 bp, Homo sapiens
tatcctgtcaytgtggcccag

SEQ ID NO: 18151 - DNA, 21 bp, Homo sapiens
cacttgtgccrggggaagtaa

SEQ ID NO: 18152 - DNA, 21 bp, Homo sapiens
cagtgctgggraccagaggga

SEQ ID NO: 18153 - DNA, 21 bp, Homo sapiens
gactacaaacmtaagttttaa

SEQ ID NO: 18154 - DNA, 21 bp, Homo sapiens
aaagacagcayggaaaggggc

SEQ ID NO: 18155 - DNA, 21 bp, Homo sapiens
attcctatagygtagactccg

SEQ ID NO: 18156 - DNA, 21 bp, Homo sapiens
ggaatctaccmaaggtcacat

SEQ ID NO: 18157 - DNA, 21 bp, Homo sapiens
agggcttggamaccagaggtc

SEQ ID NO: 18158 - DNA, 21 bp, Homo sapiens
gtgagggcatyccattttaca

SEQ ID NO: 18159 - DNA, 21 bp, Homo sapiens
gcgggggtgcmttttcaggca

SEQ ID NO: 18160 - DNA, 21 bp, Homo sapiens
tgccctggggkttggggctga

SEQ ID NO: 18161 - DNA, 21 bp, Homo sapiens
ccatggtcatkgtgggtaatc

SEQ ID NO: 18162 - DNA, 21 bp, Homo sapiens
gggagcatgcygtgagctgtc

SEQ ID NO: 18163 - DNA, 21 bp, Homo sapiens
cccctaggctrgaccagcttc

SEQ ID NO: 18164 - DNA, 21 bp, Homo sapiens
tttccttttcyacaatatgta

SEQ ID NO: 18165 - DNA, 21 bp, Homo sapiens
gatgtgcacargagtgagaca

SEQ ID NO: 18166 - DNA, 21 bp, Homo sapiens
acctggcatcrtcgggcggct

SEQ ID NO: 18167 - DNA, 21 bp, Homo sapiens
actccaataartctcaataat

SEQ ID NO: 18168 - DNA, 21 bp, Homo sapiens
tatgtcctttyagcatttgct

SEQ ID NO: 18169 - DNA, 21 bp, Homo sapiens
aatatttcacrggacttaggt

SEQ ID NO: 18170 - DNA, 21 bp, Homo sapiens
ttttacttagrgatattagtg

SEQ ID NO: 18171 - DNA, 21 bp, Homo sapiens
tgaggatgggktgccagagga

SEQ ID NO: 18172 - DNA, 21 bp, Homo sapiens
tattttaatayctttactccg

SEQ ID NO: 18173 - DNA, 21 bp, Homo sapiens
gatgagccacmcctgcctgag

SEQ ID NO: 18174 - DNA, 21 bp, Homo sapiens
ggcagttgcgrggtctctgcg

SEQ ID NO: 18175 - DNA, 21 bp, Homo sapiens
gtcagttacartggttggtat

SEQ ID NO: 18176 - DNA, 21 bp, Homo sapiens
aggtcggggayggtggatgtg

SEQ ID NO: 18177 - DNA, 21 bp, Homo sapiens
ccagcatcctrctcacacacc

SEQ ID NO: 18178 - DNA, 21 bp, Homo sapiens
aaagtgtcagktgttactgta

SEQ ID NO: 18179 - DNA, 21 bp, Homo sapiens
ctgtccatgcyccagcactgg

SEQ ID NO: 18180 - DNA, 21 bp, Homo sapiens
ctcttgcgggrtgagggttat

SEQ ID NO: 18181 - DNA, 21 bp, Homo sapiens
tctggaacacrtggcctgaag

SEQ ID NO: 18182 - DNA, 21 bp, Homo sapiens
ttcctggatcrgaagtgccct

SEQ ID NO: 18183 - DNA, 21 bp, Homo sapiens
gattcttgtakctaataggca

SEQ ID NO: 18184 - DNA, 21 bp, Homo sapiens
acacaagccargggaaggacc

SEQ ID NO: 18185 - DNA, 21 bp, Homo sapiens
tttctagtatyctacagacca

SEQ ID NO: 18186 - DNA, 21 bp, Homo sapiens
ctatagcacaraagagcttat

SEQ ID NO: 18187 - DNA, 21 bp, Homo sapiens
ttccttttgtrtttttttctg

SEQ ID NO: 18188 - DNA, 21 bp, Homo sapiens
gctccatgaarggagtgagta

SEQ ID NO: 18189 - DNA, 21 bp, Homo sapiens
ttggaactggyaggctttcat

SEQ ID NO: 18190 - DNA, 21 bp, Homo sapiens
catcagttcaygttgtcttct

SEQ ID NO: 18191 - DNA, 21 bp, Homo sapiens
ctaaagaaccrtcttaaaatt

SEQ ID NO: 18192 - DNA, 21 bp, Homo sapiens
tgctttctacytctgcctgcc

SEQ ID NO: 18193 - DNA, 21 bp, Homo sapiens
aagtgggtctrattggctcaa

SEQ ID NO: 18194 - DNA, 21 bp, Homo sapiens
cccagacgtgrtcccagcagc

SEQ ID NO: 18195 - DNA, 21 bp, Homo sapiens
cccacccaaaygctgaccagg

SEQ ID NO: 18196 - DNA, 21 bp, Homo sapiens
cctttcacctyaacaaccaga

SEQ ID NO: 18197 - DNA, 21 bp, Homo sapiens
ctggactcatkcttggagttc

SEQ ID NO: 18198 - DNA, 21 bp, Homo sapiens
gagaaacctcrcaccaagagt

SEQ ID NO: 18199 - DNA, 21 bp, Homo sapiens
gcttgtgcagmctgagccaat

SEQ ID NO: 18200 - DNA, 21 bp, Homo sapiens
tgggagggatytttctagtta

SEQ ID NO: 18201 - DNA, 21 bp, Homo sapiens
ctgcttgcccyctgtggtttg

SEQ ID NO: 18202 - DNA, 21 bp, Homo sapiens
tgaaaaccttytttcgggagc

SEQ ID NO: 18203 - DNA, 21 bp, Homo sapiens
ttggggtgggygtttgggcaa

SEQ ID NO: 18204 - DNA, 21 bp, Homo sapiens
aacctatgagytcactccaag

SEQ ID NO: 18205 - DNA, 21 bp, Homo sapiens
ctgagggttarcgatcaacat

SEQ ID NO: 18206 - DNA, 21 bp, Homo sapiens
aactcctctcrccgccagcgg

SEQ ID NO: 18207 - DNA, 21 bp, Homo sapiens
gcagaccagaygcctgaactt

SEQ ID NO: 18208 - DNA, 21 bp, Homo sapiens
acgtgtgtgcrtaaatgcctc

SEQ ID NO: 18209 - DNA, 21 bp, Homo sapiens
ccataaaataytgtctggtga

SEQ ID NO: 18210 - DNA, 21 bp, Homo sapiens
cactgtaagtyagatatagga

SEQ ID NO: 18211 - DNA, 21 bp, Homo sapiens
atgaaaaatgyttgacatttt

SEQ ID NO: 18212 - DNA, 21 bp, Homo sapiens
tactagtaacrgaaaactgaa

SEQ ID NO: 18213 - DNA, 21 bp, Homo sapiens
ttgcacaaccyatttgtgagc

SEQ ID NO: 18214 - DNA, 21 bp, Homo sapiens
tagtgtgggtratgggctgga

SEQ ID NO: 18215 - DNA, 21 bp, Homo sapiens
ctctcttgagygttcaagtgc

SEQ ID NO: 18216 - DNA, 21 bp, Homo sapiens
tatctgaaatragaagtgaag

SEQ ID NO: 18217 - DNA, 21 bp, Homo sapiens
ccacaatatgmagagaagaat

SEQ ID NO: 18218 - DNA, 21 bp, Homo sapiens
aaggacccacyctgagacaaa

SEQ ID NO: 18219 - DNA, 21 bp, Homo sapiens
aagttgattcyaaaatttgta

SEQ ID NO: 18220 - DNA, 21 bp, Homo sapiens
gacacagttcrgagcaaacag

SEQ ID NO: 18221 - DNA, 21 bp, Homo sapiens
tccaggctggrggaggagcag

SEQ ID NO: 18222 - DNA, 21 bp, Homo sapiens
gagaagctccygttcctagag

SEQ ID NO: 18223 - DNA, 21 bp, Homo sapiens
agcccagagtytgaggtcctt

SEQ ID NO: 18224 - DNA, 21 bp, Homo sapiens
ggggattaggrccaaacaggc

SEQ ID NO: 18225 - DNA, 21 bp, Homo sapiens
tgggtaagggktcctccacag

SEQ ID NO: 18226 - DNA, 21 bp, Homo sapiens
catttgtacckcggggccaga

SEQ ID NO: 18227 - DNA, 21 bp, Homo sapiens
tagaagctcamgaaagatttt

SEQ ID NO: 18228 - DNA, 21 bp, Homo sapiens
ttagaaagtarcacacgtaaa

SEQ ID NO: 18229 - DNA, 21 bp, Homo sapiens
aaagacacggytgtggtcagc

SEQ ID NO: 18230 - DNA, 21 bp, Homo sapiens
cctctgggatyctgctgggct

SEQ ID NO: 18231 - DNA, 21 bp, Homo sapiens
ggtatgggacrggttgccagg

SEQ ID NO: 18232 - DNA, 21 bp, Homo sapiens
agcagcaagtyccttaatctc

SEQ ID NO: 18233 - DNA, 21 bp, Homo sapiens
tagcacacacrgattggccgg

SEQ ID NO: 18234 - DNA, 21 bp, Homo sapiens
ttacagtgggraaaaaaaaaa

SEQ ID NO: 18235 - DNA, 21 bp, Homo sapiens
tctgggggagragtgttccag

SEQ ID NO: 18236 - DNA, 21 bp, Homo sapiens
aaggaataaaraatgtaaacc

SEQ ID NO: 18237 - DNA, 21 bp, Homo sapiens
aggttgaggaktgatcactga

SEQ ID NO: 18238 - DNA, 21 bp, Homo sapiens
ctgcttggggycatgggaatc

SEQ ID NO: 18239 - DNA, 21 bp, Homo sapiens
tgattcccccrtcctattctc

SEQ ID NO: 18240 - DNA, 21 bp, Homo sapiens
acccactgctycttcctccct

SEQ ID NO: 18241 - DNA, 21 bp, Homo sapiens
gaaatatagaytcagaagact

SEQ ID NO: 18242 - DNA, 21 bp, Homo sapiens
tgaggctgggygtctatgctg

SEQ ID NO: 18243 - DNA, 21 bp, Homo sapiens
tccctcctttyccctaagcag

SEQ ID NO: 18244 - DNA, 21 bp, Homo sapiens
gaaaccaaggygaggtggtcc

SEQ ID NO: 18245 - DNA, 21 bp, Homo sapiens
ccatcctgttratcaggagac

SEQ ID NO: 18246 - DNA, 21 bp, Homo sapiens
ctaccttactycatagtaaaa

SEQ ID NO: 18247 - DNA, 21 bp, Homo sapiens
tattaaatgargactgctggt

SEQ ID NO: 18248 - DNA, 21 bp, Homo sapiens
tccataaaccragaaagagga

SEQ ID NO: 18249 - DNA, 21 bp, Homo sapiens
ttgaattactrtcctttcaat

SEQ ID NO: 18250 - DNA, 21 bp, Homo sapiens
gaatacttggractgaaaagg

SEQ ID NO: 18251 - DNA, 21 bp, Homo sapiens
ctgaagtgctyctgtcacctt

SEQ ID NO: 18252 - DNA, 21 bp, Homo sapiens
gaagtcttgaygtgctgccta

SEQ ID NO: 18253 - DNA, 21 bp, Homo sapiens
gtaattcagcycacacactct

SEQ ID NO: 18254 - DNA, 21 bp, Homo sapiens
tacttattcartctatatgca

SEQ ID NO: 18255 - DNA, 21 bp, Homo sapiens
ttaatgtaatmacttacttca

SEQ ID NO: 18256 - DNA, 21 bp, Homo sapiens
aatccacaggkacccaacttg

SEQ ID NO: 18257 - DNA, 21 bp, Homo sapiens
ccagtgaaagrtaacaggatc

SEQ ID NO: 18258 - DNA, 21 bp, Homo sapiens
aacattgtaarataaatctaa

SEQ ID NO: 18259 - DNA, 21 bp, Homo sapiens
tcagttttccytgtactgtga

SEQ ID NO: 18260 - DNA, 21 bp, Homo sapiens
gtttctctctmtgtttgtaca

SEQ ID NO: 18261 - DNA, 21 bp, Homo sapiens
ggaatctgccraagtgtgtag

SEQ ID NO: 18262 - DNA, 21 bp, Homo sapiens
gcaatgaaaargaatgaactg

SEQ ID NO: 18263 - DNA, 21 bp, Homo sapiens
agaactggccraaataatctt

SEQ ID NO: 18264 - DNA, 21 bp, Homo sapiens
ctctgtattayttttacaatt

SEQ ID NO: 18265 - DNA, 21 bp, Homo sapiens
cttctgctgcyctgtcaattt

SEQ ID NO: 18266 - DNA, 21 bp, Homo sapiens
aattagggaayactatttgca

SEQ ID NO: 18267 - DNA, 21 bp, Homo sapiens
gacagctccaygtatgttatt

SEQ ID NO: 18268 - DNA, 21 bp, Homo sapiens
atctcccaacrtagccaatat

SEQ ID NO: 18269 - DNA, 21 bp, Homo sapiens
aagccaaatgygtaattatac

SEQ ID NO: 18270 - DNA, 21 bp, Homo sapiens
aagacatcagrctcaataaac

SEQ ID NO: 18271 - DNA, 21 bp, Homo sapiens
agtcaaacttkagtgaagcca

SEQ ID NO: 18272 - DNA, 21 bp, Homo sapiens
attccacggayaatatttatg

SEQ ID NO: 18273 - DNA, 21 bp, Homo sapiens
cacatgattcrttaaagtata

SEQ ID NO: 18274 - DNA, 21 bp, Homo sapiens
ggtcaaaaggkacctgcgcct

SEQ ID NO: 18275 - DNA, 21 bp, Homo sapiens
catccgtgttrcgagcataaa

SEQ ID NO: 18276 - DNA, 21 bp, Homo sapiens
acagcctgccygtggggatgc

SEQ ID NO: 18277 - DNA, 21 bp, Homo sapiens
tttagtcctayagggaggcct

SEQ ID NO: 18278 - DNA, 21 bp, Homo sapiens
ccctaaatctytggaaacatc

SEQ ID NO: 18279 - DNA, 21 bp, Homo sapiens
ataacccaccktgcctgtgcc

SEQ ID NO: 18280 - DNA, 21 bp, Homo sapiens
atggaggctaygcatgggctt

SEQ ID NO: 18281 - DNA, 21 bp, Homo sapiens
tgatgttgacrgaagacaagc

SEQ ID NO: 18282 - DNA, 21 bp, Homo sapiens
tgtaggaagcragcaacccca

SEQ ID NO: 18283 - DNA, 21 bp, Homo sapiens
gaagattgtarcacaacgcat

SEQ ID NO: 18284 - DNA, 21 bp, Homo sapiens
aaggtggcttyttgcatgggc

SEQ ID NO: 18285 - DNA, 21 bp, Homo sapiens
ctctacctgtrtctatttgaa

SEQ ID NO: 18286 - DNA, 21 bp, Homo sapiens
taggtcctggrtttaatgttt

SEQ ID NO: 18287 - DNA, 21 bp, Homo sapiens
ttggcatccarctcatcttcc

SEQ ID NO: 18288 - DNA, 21 bp, Homo sapiens
agaataagttyggttcaggca

SEQ ID NO: 18289 - DNA, 21 bp, Homo sapiens
ggcacacagargttgcaagat

SEQ ID NO: 18290 - DNA, 21 bp, Homo sapiens
ttgagaagggrtattatcatc

SEQ ID NO: 18291 - DNA, 21 bp, Homo sapiens
gatagcagatrttgcactatt

SEQ ID NO: 18292 - DNA, 21 bp, Homo sapiens
gttattccacrttcatgctac

SEQ ID NO: 18293 - DNA, 21 bp, Homo sapiens
taggaaatgcrtgtggaacca

SEQ ID NO: 18294 - DNA, 21 bp, Homo sapiens
agatgcacggrtggatggagc

SEQ ID NO: 18295 - DNA, 21 bp, Homo sapiens
tgaaccattcyttttcagtta

SEQ ID NO: 18296 - DNA, 21 bp, Homo sapiens
tgactctaaarcacttggcct

SEQ ID NO: 18297 - DNA, 21 bp, Homo sapiens
cattcacagcrgctggccagt

SEQ ID NO: 18298 - DNA, 21 bp, Homo sapiens
gtgtccctggmctacacgagg

SEQ ID NO: 18299 - DNA, 21 bp, Homo sapiens
aagataaactyggatcagaca

SEQ ID NO: 18300 - DNA, 21 bp, Homo sapiens
ggcaggtgaartctgggtgta

SEQ ID NO: 18301 - DNA, 21 bp, Homo sapiens
tactcttgackaattgtgtaa

SEQ ID NO: 18302 - DNA, 21 bp, Homo sapiens
tggagtcaggrttcttcttta

SEQ ID NO: 18303 - DNA, 21 bp, Homo sapiens
aagtgtcaatygttatcctgt

SEQ ID NO: 18304 - DNA, 21 bp, Homo sapiens
gcagggtcgarcaactctgga

SEQ ID NO: 18305 - DNA, 21 bp, Homo sapiens
agattataaartgataaacag

SEQ ID NO: 18306 - DNA, 21 bp, Homo sapiens
ctttatttcaytcctctatgg

SEQ ID NO: 18307 - DNA, 21 bp, Homo sapiens
tgattataccytcactgtaac

SEQ ID NO: 18308 - DNA, 21 bp, Homo sapiens
aaaatttatcrggaaaattac

SEQ ID NO: 18309 - DNA, 21 bp, Homo sapiens
gcaatgttcaygacccctctt

SEQ ID NO: 18310 - DNA, 21 bp, Homo sapiens
tgtttgctggrgctaccaaaa

SEQ ID NO: 18311 - DNA, 21 bp, Homo sapiens
ctgatggtggycgtttgggtg

SEQ ID NO: 18312 - DNA, 21 bp, Homo sapiens
aagcgtgatcrtctcagtagg

SEQ ID NO: 18313 - DNA, 21 bp, Homo sapiens
tcatctctccrgtaagatttt

SEQ ID NO: 18314 - DNA, 21 bp, Homo sapiens
aggcactccayagatgctcag

SEQ ID NO: 18315 - DNA, 21 bp, Homo sapiens
agaaagtgatycatgaaatta

SEQ ID NO: 18316 - DNA, 21 bp, Homo sapiens
cagtgaaaatkacaccttgcc

SEQ ID NO: 18317 - DNA, 21 bp, Homo sapiens
catttcatatrtaagcaggcc

SEQ ID NO: 18318 - DNA, 21 bp, Homo sapiens
gctacagttartatgtagttt

SEQ ID NO: 18319 - DNA, 21 bp, Homo sapiens
actgcaataargcgtttaaaa

SEQ ID NO: 18320 - DNA, 21 bp, Homo sapiens
agggaagcagyagggagaaaa

SEQ ID NO: 18321 - DNA, 21 bp, Homo sapiens
tgagtgtttgrgaagaaaccg

SEQ ID NO: 18322 - DNA, 21 bp, Homo sapiens
cctaacctacktttctctctt

SEQ ID NO: 18323 - DNA, 21 bp, Homo sapiens
ttttggcaatkttagtaataa

SEQ ID NO: 18324 - DNA, 21 bp, Homo sapiens
ctattttctcracaagcagaa

SEQ ID NO: 18325 - DNA, 21 bp, Homo sapiens
tttgcttttgragagcatgca

SEQ ID NO: 18326 - DNA, 21 bp, Homo sapiens
aaaaaggaacrcgctgcctgt

SEQ ID NO: 18327 - DNA, 21 bp, Homo sapiens
ggcttgcagartggctgcaag

SEQ ID NO: 18328 - DNA, 21 bp, Homo sapiens
catcaccataygactgtcggt

SEQ ID NO: 18329 - DNA, 21 bp, Homo sapiens
tgaagctaacyttgacttttg

SEQ ID NO: 18330 - DNA, 21 bp, Homo sapiens
ggtattcacayacaaagatag

SEQ ID NO: 18331 - DNA, 21 bp, Homo sapiens
aaggtcccagraggagtatgt

SEQ ID NO: 18332 - DNA, 21 bp, Homo sapiens
ccgctccctcrttactttaaa

SEQ ID NO: 18333 - DNA, 21 bp, Homo sapiens
ttttacttcaygtaactgaag

SEQ ID NO: 18334 - DNA, 21 bp, Homo sapiens
atgttacttaygggaaatgac

SEQ ID NO: 18335 - DNA, 21 bp, Homo sapiens
gtcatggtgcygtacagctgg

SEQ ID NO: 18336 - DNA, 21 bp, Homo sapiens
accgtgtcttycttcctactc

SEQ ID NO: 18337 - DNA, 21 bp, Homo sapiens
gcattacaatrtgattgggga

SEQ ID NO: 18338 - DNA, 21 bp, Homo sapiens
aaagaaatacytcgtgttctg

SEQ ID NO: 18339 - DNA, 21 bp, Homo sapiens
cttgagtaggytctgaattgt

SEQ ID NO: 18340 - DNA, 21 bp, Homo sapiens
gtggagagtgyaaacataaag

SEQ ID NO: 18341 - DNA, 21 bp, Homo sapiens
gaaatattacrggaatgattt

SEQ ID NO: 18342 - DNA, 21 bp, Homo sapiens
tttttcccttyggcactaagt

SEQ ID NO: 18343 - DNA, 21 bp, Homo sapiens
cagttgtataygcagctagca

SEQ ID NO: 18344 - DNA, 21 bp, Homo sapiens
aaagatacaayggaaagatgg

SEQ ID NO: 18345 - DNA, 21 bp, Homo sapiens
tgtgagctctyggagcatgtt

SEQ ID NO: 18346 - DNA, 21 bp, Homo sapiens
agaaaagtaayattctctagg

SEQ ID NO: 18347 - DNA, 21 bp, Homo sapiens
tgagaatcccrtattattaca

SEQ ID NO: 18348 - DNA, 21 bp, Homo sapiens
gcaagattgayctgtgagtgt

SEQ ID NO: 18349 - DNA, 21 bp, Homo sapiens
ccagactctcrggtgcagggg

SEQ ID NO: 18350 - DNA, 21 bp, Homo sapiens
tttggagtcaytctgtccact

SEQ ID NO: 18351 - DNA, 21 bp, Homo sapiens
aaggctttgcrcttcggggtg

SEQ ID NO: 18352 - DNA, 21 bp, Homo sapiens
aataaggagaytttggcatac

SEQ ID NO: 18353 - DNA, 21 bp, Homo sapiens
cttaacaaaayttccatgcca

SEQ ID NO: 18354 - DNA, 21 bp, Homo sapiens
gctatactcaytgggagaacc

SEQ ID NO: 18355 - DNA, 21 bp, Homo sapiens
cactaactatyagaagataaa

SEQ ID NO: 18356 - DNA, 21 bp, Homo sapiens
aaaatggctamtgtgaggaaa

SEQ ID NO: 18357 - DNA, 21 bp, Homo sapiens
cacgctaaaayccatctagat

SEQ ID NO: 18358 - DNA, 21 bp, Homo sapiens
agaaagcgggkatgatgaaag

SEQ ID NO: 18359 - DNA, 21 bp, Homo sapiens
tcaaagcagtrtatgaagtgc

SEQ ID NO: 18360 - DNA, 21 bp, Homo sapiens
atgtaattcamcctcctcttt

SEQ ID NO: 18361 - DNA, 21 bp, Homo sapiens
tggcatgactygggtccagaa

SEQ ID NO: 18362 - DNA, 21 bp, Homo sapiens
tcacacactcygttccctgta

SEQ ID NO: 18363 - DNA, 21 bp, Homo sapiens
cattcttgccrtctagaggtc

SEQ ID NO: 18364 - DNA, 21 bp, Homo sapiens
taatccgtcaycttccttatg

SEQ ID NO: 18365 - DNA, 21 bp, Homo sapiens
ccccctgaagytctgaggttg

SEQ ID NO: 18366 - DNA, 21 bp, Homo sapiens
ttcactgatcrataaccacac

SEQ ID NO: 18367 - DNA, 21 bp, Homo sapiens
ctttctagttyacagacaatt

SEQ ID NO: 18368 - DNA, 21 bp, Homo sapiens
tttgaacggaygacaaactat

SEQ ID NO: 18369 - DNA, 21 bp, Homo sapiens
tttacactatrttttagttta

SEQ ID NO: 18370 - DNA, 21 bp, Homo sapiens
cttattaaagracgtttactg

SEQ ID NO: 18371 - DNA, 21 bp, Homo sapiens
caaagagacayctatcattta

SEQ ID NO: 18372 - DNA, 21 bp, Homo sapiens
atttcaatagygggatcagac

SEQ ID NO: 18373 - DNA, 21 bp, Homo sapiens
taagcaatacraatgggaaaa

SEQ ID NO: 18374 - DNA, 21 bp, Homo sapiens
aaacaggtctktgaataaatg

SEQ ID NO: 18375 - DNA, 21 bp, Homo sapiens
cacaacagtcraaccagtttt

SEQ ID NO: 18376 - DNA, 21 bp, Homo sapiens
ttaaactgccraaaacaaaaa

SEQ ID NO: 18377 - DNA, 21 bp, Homo sapiens
aaatgcacacrctgcactcgg

SEQ ID NO: 18378 - DNA, 21 bp, Homo sapiens
tggcttaaatrtctctagcta

SEQ ID NO: 18379 - DNA, 21 bp, Homo sapiens
ttcgatgaatrcttctgaagg

SEQ ID NO: 18380 - DNA, 21 bp, Homo sapiens
gaccaacctcmatattagtaa

SEQ ID NO: 18381 - DNA, 21 bp, Homo sapiens
cttcattcccrgtgatcacgt

SEQ ID NO: 18382 - DNA, 21 bp, Homo sapiens
gttgttcttcygttccccatt

SEQ ID NO: 18383 - DNA, 21 bp, Homo sapiens
cacttcctgtrggcttgcctt

SEQ ID NO: 18384 - DNA, 21 bp, Homo sapiens
ctgtctctctrgctgcatggt

SEQ ID NO: 18385 - DNA, 21 bp, Homo sapiens
aaacttgaagyctctggacat

SEQ ID NO: 18386 - DNA, 21 bp, Homo sapiens
actggcacatmgtaaatgcaa

SEQ ID NO: 18387 - DNA, 21 bp, Homo sapiens
gccctcttccyggcatgccac

SEQ ID NO: 18388 - DNA, 21 bp, Homo sapiens
ctcacatcagyggttttctaa

SEQ ID NO: 18389 - DNA, 21 bp, Homo sapiens
cccagctaacrtccttcttag

SEQ ID NO: 18390 - DNA, 21 bp, Homo sapiens
aatccctgcgygcacacacat

SEQ ID NO: 18391 - DNA, 21 bp, Homo sapiens
cgcttccaggrtcagccctat

SEQ ID NO: 18392 - DNA, 21 bp, Homo sapiens
ccagactccartactctcgac

SEQ ID NO: 18393 - DNA, 21 bp, Homo sapiens
atggctagtayggacactatg

SEQ ID NO: 18394 - DNA, 21 bp, Homo sapiens
gcaatggatgytggagtcaac

SEQ ID NO: 18395 - DNA, 21 bp, Homo sapiens
taatgagggaytgggtcagga

SEQ ID NO: 18396 - DNA, 21 bp, Homo sapiens
tttataattgrgcctgtgggt

SEQ ID NO: 18397 - DNA, 21 bp, Homo sapiens
ggtgaaaagayttctgccctg

SEQ ID NO: 18398 - DNA, 21 bp, Homo sapiens
aactatgctaygtcatgtcgg

SEQ ID NO: 18399 - DNA, 21 bp, Homo sapiens
gatgcaatcaygaagaaaagt

SEQ ID NO: 18400 - DNA, 21 bp, Homo sapiens
aacctgaagayactgaaaaga

SEQ ID NO: 18401 - DNA, 21 bp, Homo sapiens
ataaacataayccctgccatc

SEQ ID NO: 18402 - DNA, 21 bp, Homo sapiens
aattcactttmtacttagtat

SEQ ID NO: 18403 - DNA, 21 bp, Homo sapiens
cagatactatratgagtatga

SEQ ID NO: 18404 - DNA, 21 bp, Homo sapiens
ttaattctagyccaatgaaat

SEQ ID NO: 18405 - DNA, 21 bp, Homo sapiens
caatcagcctyggagatggtt

SEQ ID NO: 18406 - DNA, 21 bp, Homo sapiens
gatattgctcrgtatccctct

SEQ ID NO: 18407 - DNA, 21 bp, Homo sapiens
aagcatccaarggtaattgca

SEQ ID NO: 18408 - DNA, 21 bp, Homo sapiens
tattctttaayttttctgaag

SEQ ID NO: 18409 - DNA, 21 bp, Homo sapiens
gtggtaaactrtgcaagacag

SEQ ID NO: 18410 - DNA, 21 bp, Homo sapiens
aagagatgacygggaattgtg

SEQ ID NO: 18411 - DNA, 21 bp, Homo sapiens
ttcttggaaakgcactttgtt

SEQ ID NO: 18412 - DNA, 21 bp, Homo sapiens
gctcagagttmctggggtaat

SEQ ID NO: 18413 - DNA, 21 bp, Homo sapiens
aatctagcaaygagaatgacc

SEQ ID NO: 18414 - DNA, 21 bp, Homo sapiens
aaaatccttayggaatgaaga

SEQ ID NO: 18415 - DNA, 21 bp, Homo sapiens
tcaaatgcctytatcgtgttg

SEQ ID NO: 18416 - DNA, 21 bp, Homo sapiens
cactttgggarctcattggca

SEQ ID NO: 18417 - DNA, 21 bp, Homo sapiens
tcagtccacartggctcactg

SEQ ID NO: 18418 - DNA, 21 bp, Homo sapiens
caggctaaagrtttcactgaa

SEQ ID NO: 18419 - DNA, 21 bp, Homo sapiens
ttatcatttcktttgtatgtg

SEQ ID NO: 18420 - DNA, 21 bp, Homo sapiens
tatcaggtagrtgtattgtaa

SEQ ID NO: 18421 - DNA, 21 bp, Homo sapiens
cagctcgcccrcgggatcaat

SEQ ID NO: 18422 - DNA, 21 bp, Homo sapiens
ttagatttacrtttctatcac

SEQ ID NO: 18423 - DNA, 21 bp, Homo sapiens
tgtaaacaccrtaagttggca

SEQ ID NO: 18424 - DNA, 21 bp, Homo sapiens
tagaggaggamtttagttcac

SEQ ID NO: 18425 - DNA, 21 bp, Homo sapiens
actgagtattygttcatcgat

SEQ ID NO: 18426 - DNA, 21 bp, Homo sapiens
aaagacaatcrtagaccataa

SEQ ID NO: 18427 - DNA, 21 bp, Homo sapiens
tattatttttrgctttgtttg

SEQ ID NO: 18428 - DNA, 21 bp, Homo sapiens
agcaaagttcrgaggagaagt

SEQ ID NO: 18429 - DNA, 21 bp, Homo sapiens
tctgcaggtcytggtctgatt

SEQ ID NO: 18430 - DNA, 21 bp, Homo sapiens
tacagaaaacraaaacgtggt

SEQ ID NO: 18431 - DNA, 21 bp, Homo sapiens
ttatcactcargcaaaccaga

SEQ ID NO: 18432 - DNA, 21 bp, Homo sapiens
aatgaaaaaamataacctggc

SEQ ID NO: 18433 - DNA, 21 bp, Homo sapiens
atctaaaaaaygatcctataa

SEQ ID NO: 18434 - DNA, 21 bp, Homo sapiens
tagcagaaagrcagctattat

SEQ ID NO: 18435 - DNA, 21 bp, Homo sapiens
gtagcctaaayggagaagagc

SEQ ID NO: 18436 - DNA, 21 bp, Homo sapiens
tatactgctgyttttcttcaa

SEQ ID NO: 18437 - DNA, 21 bp, Homo sapiens
gttcattaatraaaattcaaa

SEQ ID NO: 18438 - DNA, 21 bp, Homo sapiens
aacaacatcaytcctagacat

SEQ ID NO: 18439 - DNA, 21 bp, Homo sapiens
tgtattatagytgttttcaga

SEQ ID NO: 18440 - DNA, 21 bp, Homo sapiens
atttacgctcygcttcttgga

SEQ ID NO: 18441 - DNA, 21 bp, Homo sapiens
gatactggatygaattaccag

SEQ ID NO: 18442 - DNA, 21 bp, Homo sapiens
agacaatggtygttcacttca

SEQ ID NO: 18443 - DNA, 21 bp, Homo sapiens
tccatgaacaytcactcaaat

SEQ ID NO: 18444 - DNA, 21 bp, Homo sapiens
tgattttagcrttgtattgtg

SEQ ID NO: 18445 - DNA, 21 bp, Homo sapiens
ggatgttacarattcattgct

SEQ ID NO: 18446 - DNA, 21 bp, Homo sapiens
atacaagttartaatggaata

SEQ ID NO: 18447 - DNA, 21 bp, Homo sapiens
ccaaaaggctyttatggtttg

SEQ ID NO: 18448 - DNA, 21 bp, Homo sapiens
tacactttatrgaatatattc

SEQ ID NO: 18449 - DNA, 21 bp, Homo sapiens
cgagttacaaytggaaatcac

SEQ ID NO: 18450 - DNA, 21 bp, Homo sapiens
tcaggatttgrcatgtagttt

SEQ ID NO: 18451 - DNA, 21 bp, Homo sapiens
gggcaggtcakctctgatgat

SEQ ID NO: 18452 - DNA, 21 bp, Homo sapiens
agcataatctrtttcaatggg

SEQ ID NO: 18453 - DNA, 21 bp, Homo sapiens
atactttttcratataaaata

SEQ ID NO: 18454 - DNA, 21 bp, Homo sapiens
catttctctcrggagcaggaa

SEQ ID NO: 18455 - DNA, 21 bp, Homo sapiens
gtatatgtacycaaaacagga

SEQ ID NO: 18456 - DNA, 21 bp, Homo sapiens
acctatatccmctgcaaacta

SEQ ID NO: 18457 - DNA, 21 bp, Homo sapiens
gaaggttcatkagtcccatgt

SEQ ID NO: 18458 - DNA, 21 bp, Homo sapiens
ccttctcctcrggcctatttc

SEQ ID NO: 18459 - DNA, 21 bp, Homo sapiens
ggaacagccaractccccgtg

SEQ ID NO: 18460 - DNA, 21 bp, Homo sapiens
attggattttrtgttaattta

SEQ ID NO: 18461 - DNA, 21 bp, Homo sapiens
ggtctttagamgctgtaatct

SEQ ID NO: 18462 - DNA, 21 bp, Homo sapiens
tgttttaatckcaattctaac

SEQ ID NO: 18463 - DNA, 21 bp, Homo sapiens
tgcatgtatcrgcatgggtaa

SEQ ID NO: 18464 - DNA, 21 bp, Homo sapiens
agtagcagtamaaatatatcc

SEQ ID NO: 18465 - DNA, 21 bp, Homo sapiens
caggaacttcrctcaccaaat

SEQ ID NO: 18466 - DNA, 21 bp, Homo sapiens
gtttatgtctragaccatctg

SEQ ID NO: 18467 - DNA, 21 bp, Homo sapiens
tcataagagcrttttgactca

SEQ ID NO: 18468 - DNA, 21 bp, Homo sapiens
gtgcttttcargatgtgtgcc

SEQ ID NO: 18469 - DNA, 21 bp, Homo sapiens
gaatggcaggrtaagaagata

SEQ ID NO: 18470 - DNA, 21 bp, Homo sapiens
agagctgctaytttaggataa

SEQ ID NO: 18471 - DNA, 21 bp, Homo sapiens
aggagatcttyatatatgcaa

SEQ ID NO: 18472 - DNA, 21 bp, Homo sapiens
aggaaggaaaragagtcaggt

SEQ ID NO: 18473 - DNA, 21 bp, Homo sapiens
gaaaacaacgkcaagaagaaa

SEQ ID NO: 18474 - DNA, 21 bp, Homo sapiens
tctgaccaggkcctgtgaaat

SEQ ID NO: 18475 - DNA, 21 bp, Homo sapiens
tcaccaccaamacttggtata

SEQ ID NO: 18476 - DNA, 21 bp, Homo sapiens
agtattgtagrtctgtaaatt

SEQ ID NO: 18477 - DNA, 21 bp, Homo sapiens
tagactatggktttggctttt

SEQ ID NO: 18478 - DNA, 21 bp, Homo sapiens
aacattaattyatgttgttga

SEQ ID NO: 18479 - DNA, 21 bp, Homo sapiens
aactggttaayagcaatatga

SEQ ID NO: 18480 - DNA, 21 bp, Homo sapiens
tcgttatactrgtttacctaa

SEQ ID NO: 18481 - DNA, 21 bp, Homo sapiens
ctggtgagtcktttgtaatat

SEQ ID NO: 18482 - DNA, 21 bp, Homo sapiens
ctctggtttgrttgaaaaggt

SEQ ID NO: 18483 - DNA, 21 bp, Homo sapiens
ccaacctactkttagatcagg

SEQ ID NO: 18484 - DNA, 21 bp, Homo sapiens
agcacaaaccrtatccataca

SEQ ID NO: 18485 - DNA, 21 bp, Homo sapiens
tcctcatttcrcaaataaggg

SEQ ID NO: 18486 - DNA, 21 bp, Homo sapiens
gcacaaatgartggcacatcc

SEQ ID NO: 18487 - DNA, 21 bp, Homo sapiens
ctactgcaccrtaacatggca

SEQ ID NO: 18488 - DNA, 21 bp, Homo sapiens
ttattttcttktaccaccata

SEQ ID NO: 18489 - DNA, 21 bp, Homo sapiens
ggcacggaagytggaaatatc

SEQ ID NO: 18490 - DNA, 21 bp, Homo sapiens
gaaaataatgrtgctgctacg

SEQ ID NO: 18491 - DNA, 21 bp, Homo sapiens
aaacacctttktgatttatac

SEQ ID NO: 18492 - DNA, 21 bp, Homo sapiens
ctagatcctcmgactatggct

SEQ ID NO: 18493 - DNA, 21 bp, Homo sapiens
ataagctcaartataacattt

SEQ ID NO: 18494 - DNA, 21 bp, Homo sapiens
taaagcaaagygcatatagat

SEQ ID NO: 18495 - DNA, 21 bp, Homo sapiens
gagattcatayattctatgtt

SEQ ID NO: 18496 - DNA, 21 bp, Homo sapiens
ttatttgtcarttatatgtca

SEQ ID NO: 18497 - DNA, 21 bp, Homo sapiens
agaggcagtayagtatttcat

SEQ ID NO: 18498 - DNA, 21 bp, Homo sapiens
cgtattctttytctctgcctg

SEQ ID NO: 18499 - DNA, 21 bp, Homo sapiens
ttagcttgggkctctcaaaat

SEQ ID NO: 18500 - DNA, 21 bp, Homo sapiens
cctttaatagrtttctgtgca

SEQ ID NO: 18501 - DNA, 21 bp, Homo sapiens
atatgtaattrtgccccaaca

SEQ ID NO: 18502 - DNA, 21 bp, Homo sapiens
gttctctactrcctttgtaga

SEQ ID NO: 18503 - DNA, 21 bp, Homo sapiens
aatcacgtggrcagtttctcc

SEQ ID NO: 18504 - DNA, 21 bp, Homo sapiens
tcaaggaaagmaattacttct

SEQ ID NO: 18505 - DNA, 21 bp, Homo sapiens
ccaggagcagytgacagcagg

SEQ ID NO: 18506 - DNA, 21 bp, Homo sapiens
gctctgtgtcrctcagtttca

SEQ ID NO: 18507 - DNA, 21 bp, Homo sapiens
caatccttatygacgatagtt

SEQ ID NO: 18508 - DNA, 21 bp, Homo sapiens
gtggataagcmctctcttcaa

SEQ ID NO: 18509 - DNA, 21 bp, Homo sapiens
tttcttcaagrtcttaccctt

SEQ ID NO: 18510 - DNA, 21 bp, Homo sapiens
aggtttttgaygaacatcctt

SEQ ID NO: 18511 - DNA, 21 bp, Homo sapiens
aagctagatamccatttgtta

SEQ ID NO: 18512 - DNA, 21 bp, Homo sapiens
agtccttgcartgattatcta

SEQ ID NO: 18513 - DNA, 21 bp, Homo sapiens
tctagcatgtrcagttcattc

SEQ ID NO: 18514 - DNA, 21 bp, Homo sapiens
ttaacagatamacagttgttc

SEQ ID NO: 18515 - DNA, 21 bp, Homo sapiens
tcttagcacayagcagctgcc

SEQ ID NO: 18516 - DNA, 21 bp, Homo sapiens
tgcggccccakagcaggtagt

SEQ ID NO: 18517 - DNA, 21 bp, Homo sapiens
ttcatttactrtacgcagaga

SEQ ID NO: 18518 - DNA, 21 bp, Homo sapiens
cacactgacayacaagtttat

SEQ ID NO: 18519 - DNA, 21 bp, Homo sapiens
aattaacctgmatctctttgg

SEQ ID NO: 18520 - DNA, 21 bp, Homo sapiens
tctcctaatcrtctgcccagg

SEQ ID NO: 18521 - DNA, 21 bp, Homo sapiens
tttcaaggacygacatgcttc

SEQ ID NO: 18522 - DNA, 21 bp, Homo sapiens
cctttattgtytgaaactttc

SEQ ID NO: 18523 - DNA, 21 bp, Homo sapiens
ataatatttcrtttccaggta

SEQ ID NO: 18524 - DNA, 21 bp, Homo sapiens
aactgaaaatrtaagtttaaa

SEQ ID NO: 18525 - DNA, 21 bp, Homo sapiens
ctgtagtcctraactgtaatt

SEQ ID NO: 18526 - DNA, 21 bp, Homo sapiens
ttggattggcygaagcctttg

SEQ ID NO: 18527 - DNA, 21 bp, Homo sapiens
ttaggatctaygtgtcaaagt

SEQ ID NO: 18528 - DNA, 21 bp, Homo sapiens
ggaaaagacayatattttagt

SEQ ID NO: 18529 - DNA, 21 bp, Homo sapiens
atttgcattaycttttatgcc

SEQ ID NO: 18530 - DNA, 21 bp, Homo sapiens
aagatgtaacycaaaatagat

SEQ ID NO: 18531 - DNA, 21 bp, Homo sapiens
tcatgattatraactaaggtg

SEQ ID NO: 18532 - DNA, 21 bp, Homo sapiens
attaaattgarcttactctga

SEQ ID NO: 18533 - DNA, 21 bp, Homo sapiens
aagtatattcrtatgggtgga

SEQ ID NO: 18534 - DNA, 21 bp, Homo sapiens
gacacggaagrccaatattat

SEQ ID NO: 18535 - DNA, 21 bp, Homo sapiens
cacaaattacmgttctaacct

SEQ ID NO: 18536 - DNA, 21 bp, Homo sapiens
tgactttctcrgactgatgcc

SEQ ID NO: 18537 - DNA, 21 bp, Homo sapiens
ggaaacctgaygtgtattatc

SEQ ID NO: 18538 - DNA, 21 bp, Homo sapiens
tatttacagcktcctttgtta

SEQ ID NO: 18539 - DNA, 21 bp, Homo sapiens
aaaaggccacratcaaattct

SEQ ID NO: 18540 - DNA, 21 bp, Homo sapiens
ggtgggcagtygccatattca

SEQ ID NO: 18541 - DNA, 21 bp, Homo sapiens
tatattaaaamtcactcagca

SEQ ID NO: 18542 - DNA, 21 bp, Homo sapiens
aaaataagagygagttgtgat

SEQ ID NO: 18543 - DNA, 21 bp, Homo sapiens
caaggaaaacrcagagtcatc

SEQ ID NO: 18544 - DNA, 21 bp, Homo sapiens
acaatttccayagtactggaa

SEQ ID NO: 18545 - DNA, 21 bp, Homo sapiens
tctagaaaacyccctaatctt

SEQ ID NO: 18546 - DNA, 21 bp, Homo sapiens
ttgaatagcaygttagtagca

SEQ ID NO: 18547 - DNA, 21 bp, Homo sapiens
catgtttcttraatacaataa

SEQ ID NO: 18548 - DNA, 21 bp, Homo sapiens
atttctgtgcygcaactgagt

SEQ ID NO: 18549 - DNA, 21 bp, Homo sapiens
gaagacacctytcttcctttt

SEQ ID NO: 18550 - DNA, 21 bp, Homo sapiens
ctctggtatgygtggttttca

SEQ ID NO: 18551 - DNA, 21 bp, Homo sapiens
ctatgaggcargtagcgagta

SEQ ID NO: 18552 - DNA, 21 bp, Homo sapiens
catctctgaakgaagagaggg

SEQ ID NO: 18553 - DNA, 21 bp, Homo sapiens
ttgctaaacargtagtccttt

SEQ ID NO: 18554 - DNA, 21 bp, Homo sapiens
ttccaccactrtatagctaga

SEQ ID NO: 18555 - DNA, 21 bp, Homo sapiens
gtgctcctgaygccctttacc

SEQ ID NO: 18556 - DNA, 21 bp, Homo sapiens
acatactacaytttccatgaa

SEQ ID NO: 18557 - DNA, 21 bp, Homo sapiens
tttatctattrtatttatact

SEQ ID NO: 18558 - DNA, 21 bp, Homo sapiens
tgtggataccyacactttcag

SEQ ID NO: 18559 - DNA, 21 bp, Homo sapiens
atgagaaagtrtaggataggt

SEQ ID NO: 18560 - DNA, 21 bp, Homo sapiens
gtatcttgtcyagagtatagc

SEQ ID NO: 18561 - DNA, 21 bp, Homo sapiens
tttcaagtaayattgtaactc

SEQ ID NO: 18562 - DNA, 21 bp, Homo sapiens
caaaggtacaygcagaaaatc

SEQ ID NO: 18563 - DNA, 21 bp, Homo sapiens
ttgctgcttcrtttcattatg

SEQ ID NO: 18564 - DNA, 21 bp, Homo sapiens
atggcttggayttttggaggt

SEQ ID NO: 18565 - DNA, 21 bp, Homo sapiens
gccaccatacytgcattccca

SEQ ID NO: 18566 - DNA, 21 bp, Homo sapiens
ttgcccactcrtgttgctact

SEQ ID NO: 18567 - DNA, 21 bp, Homo sapiens
ttttctgctcytaaatatata

SEQ ID NO: 18568 - DNA, 21 bp, Homo sapiens
tttaattcatkacctcttttt

SEQ ID NO: 18569 - DNA, 21 bp, Homo sapiens
tgagatgaagrtttgtatcag

SEQ ID NO: 18570 - DNA, 21 bp, Homo sapiens
tgtgaaacttratcataaaaa

SEQ ID NO: 18571 - DNA, 21 bp, Homo sapiens
ttctgagcctyaggtttttaa

SEQ ID NO: 18572 - DNA, 21 bp, Homo sapiens
tgaggcgctcmacaagcagat

SEQ ID NO: 18573 - DNA, 21 bp, Homo sapiens
gggaggccacyacctcaggcc

SEQ ID NO: 18574 - DNA, 21 bp, Homo sapiens
gcaggtgcatkggtggggccc

SEQ ID NO: 18575 - DNA, 21 bp, Homo sapiens
atatggaaacrcctatttaag

SEQ ID NO: 18576 - DNA, 21 bp, Homo sapiens
gtgaggccttrtacagggatg

SEQ ID NO: 18577 - DNA, 21 bp, Homo sapiens
gcagcctaccrtggcttttgg

SEQ ID NO: 18578 - DNA, 21 bp, Homo sapiens
cttgttgtcarcatgaattct

SEQ ID NO: 18579 - DNA, 21 bp, Homo sapiens
tgatgacttgrcccttttatt

SEQ ID NO: 18580 - DNA, 21 bp, Homo sapiens
aggttctgccrtccaggggtt

SEQ ID NO: 18581 - DNA, 21 bp, Homo sapiens
gcatcttatgrgaactattag

SEQ ID NO: 18582 - DNA, 21 bp, Homo sapiens
taattgatatrcagatgttga

SEQ ID NO: 18583 - DNA, 21 bp, Homo sapiens
aggtggaaacmggtatctccc

SEQ ID NO: 18584 - DNA, 21 bp, Homo sapiens
attattcatarcacctaccac

SEQ ID NO: 18585 - DNA, 21 bp, Homo sapiens
gagttgcaagkttccttgaaa

SEQ ID NO: 18586 - DNA, 21 bp, Homo sapiens
tgttccatgcrcctgtccgga

SEQ ID NO: 18587 - DNA, 21 bp, Homo sapiens
agctgcctgayggccacttag

SEQ ID NO: 18588 - DNA, 21 bp, Homo sapiens
ggcctctgctyacacttaagc

SEQ ID NO: 18589 - DNA, 21 bp, Homo sapiens
tttaggcctcygacctgtata

SEQ ID NO: 18590 - DNA, 21 bp, Homo sapiens
aacagccataygcaaacgggc

SEQ ID NO: 18591 - DNA, 21 bp, Homo sapiens
tctggccgttkaaacctgcgg

SEQ ID NO: 18592 - DNA, 21 bp, Homo sapiens
gggagacccgrgaggtctttg

SEQ ID NO: 18593 - DNA, 21 bp, Homo sapiens
caggctgggcmcacgcaggga

SEQ ID NO: 18594 - DNA, 21 bp, Homo sapiens
ggtgattttayaagggggtgc

SEQ ID NO: 18595 - DNA, 21 bp, Homo sapiens
attacagcccraaataagcag

SEQ ID NO: 18596 - DNA, 21 bp, Homo sapiens
tagctgggagragggaggcgg

SEQ ID NO: 18597 - DNA, 21 bp, Homo sapiens
cactgctcaayccccagaacc

SEQ ID NO: 18598 - DNA, 21 bp, Homo sapiens
acattcttgaygcgtgtcctg

SEQ ID NO: 18599 - DNA, 21 bp, Homo sapiens
ggggccgtttyctgacactac

SEQ ID NO: 18600 - DNA, 21 bp, Homo sapiens
tcagcactcckgcggctccag

SEQ ID NO: 18601 - DNA, 21 bp, Homo sapiens
cgcaaatatcygtccgctggt

SEQ ID NO: 18602 - DNA, 21 bp, Homo sapiens
acatcccgggrccgtgggaga

SEQ ID NO: 18603 - DNA, 21 bp, Homo sapiens
accgaacctgycgtttcgccg

SEQ ID NO: 18604 - DNA, 21 bp, Homo sapiens
ccagctcgaaygacgcaggac

SEQ ID NO: 18605 - DNA, 21 bp, Homo sapiens
actgccaggcmtgggcggttc

SEQ ID NO: 18606 - DNA, 21 bp, Homo sapiens
cttcttcgagygtgactgtct

SEQ ID NO: 18607 - DNA, 21 bp, Homo sapiens
gatggctgagygggtcagcgg

SEQ ID NO: 18608 - DNA, 21 bp, Homo sapiens
ttccttctggyctgtagccag

SEQ ID NO: 18609 - DNA, 21 bp, Homo sapiens
ttctggagagrtgcttatccg

SEQ ID NO: 18610 - DNA, 21 bp, Homo sapiens
tgcccagcccytcagggccag

SEQ ID NO: 18611 - DNA, 21 bp, Homo sapiens
tgggcatccckcaggcacacc

SEQ ID NO: 18612 - DNA, 21 bp, Homo sapiens
cggaggaggcmtctgccctca

SEQ ID NO: 18613 - DNA, 21 bp, Homo sapiens
agggcctcacrcacagtcctg

SEQ ID NO: 18614 - DNA, 21 bp, Homo sapiens
tctctttggcrtctggcctct

SEQ ID NO: 18615 - DNA, 21 bp, Homo sapiens
cttccacagaygggaattgtg

SEQ ID NO: 18616 - DNA, 21 bp, Homo sapiens
acaagattaayaatagaatct

SEQ ID NO: 18617 - DNA, 21 bp, Homo sapiens
ttgcctcacaygtcagggcag

SEQ ID NO: 18618 - DNA, 21 bp, Homo sapiens
acacaacctgyccaactgtac

SEQ ID NO: 18619 - DNA, 21 bp, Homo sapiens
agtgtcacacmtcagcccccc

SEQ ID NO: 18620 - DNA, 21 bp, Homo sapiens
tattcttattyaggatgaaac

SEQ ID NO: 18621 - DNA, 21 bp, Homo sapiens
ggacaaatcarcagctgccat

SEQ ID NO: 18622 - DNA, 21 bp, Homo sapiens
aatgtttaaartatgcaatta

SEQ ID NO: 18623 - DNA, 21 bp, Homo sapiens
cagaattctaygccactggct

SEQ ID NO: 18624 - DNA, 21 bp, Homo sapiens
taaagggatakctctaggggt

SEQ ID NO: 18625 - DNA, 21 bp, Homo sapiens
caggtggcccragtgtattta

SEQ ID NO: 18626 - DNA, 21 bp, Homo sapiens
aggtaaggctrtcacatatca

SEQ ID NO: 18627 - DNA, 21 bp, Homo sapiens
ccagacctgcrcagaacactt

SEQ ID NO: 18628 - DNA, 21 bp, Homo sapiens
ccctgccacamctgttcttcc

SEQ ID NO: 18629 - DNA, 21 bp, Homo sapiens
ccttggcttartctttgagat

SEQ ID NO: 18630 - DNA, 21 bp, Homo sapiens
cttacattcayaggccttttc

SEQ ID NO: 18631 - DNA, 21 bp, Homo sapiens
aaaaaaaattrctgccatttt

SEQ ID NO: 18632 - DNA, 21 bp, Homo sapiens
tcaccctcatrttctcccaaa

SEQ ID NO: 18633 - DNA, 21 bp, Homo sapiens
atcttccttgycaaatttaga

SEQ ID NO: 18634 - DNA, 21 bp, Homo sapiens
agagagaagcygagttcttgc

SEQ ID NO: 18635 - DNA, 21 bp, Homo sapiens
ggagtcctccrgttctgagag

SEQ ID NO: 18636 - DNA, 21 bp, Homo sapiens
ccatctggttmcacagtctac

SEQ ID NO: 18637 - DNA, 21 bp, Homo sapiens
gcaaatcggtrctgactggga

SEQ ID NO: 18638 - DNA, 21 bp, Homo sapiens
ataagtgccaygatgcaggga

SEQ ID NO: 18639 - DNA, 21 bp, Homo sapiens
ttctgtcattyccacctaaat

SEQ ID NO: 18640 - DNA, 21 bp, Homo sapiens
agaaggtgtcygcactgtttt

SEQ ID NO: 18641 - DNA, 21 bp, Homo sapiens
taaatggctcygctgttttca

SEQ ID NO: 18642 - DNA, 21 bp, Homo sapiens
attcgtgagcycacaagtcaa

SEQ ID NO: 18643 - DNA, 21 bp, Homo sapiens
cttgagaagaraagctttacc

SEQ ID NO: 18644 - DNA, 21 bp, Homo sapiens
gttgcctctaygtgtctctgg

SEQ ID NO: 18645 - DNA, 21 bp, Homo sapiens
cagaaatgacmagacaagaaa

SEQ ID NO: 18646 - DNA, 21 bp, Homo sapiens
ctggatatctrggggaagaga

SEQ ID NO: 18647 - DNA, 21 bp, Homo sapiens
tccattcagcmgatatttctt

SEQ ID NO: 18648 - DNA, 21 bp, Homo sapiens
tgcaattctgkcagcaaactc

SEQ ID NO: 18649 - DNA, 21 bp, Homo sapiens
gtcactaagaygatcacagtt

SEQ ID NO: 18650 - DNA, 21 bp, Homo sapiens
gcatgtggttyctattagggg

SEQ ID NO: 18651 - DNA, 21 bp, Homo sapiens
aagagaaaagyctgactttga

SEQ ID NO: 18652 - DNA, 21 bp, Homo sapiens
aaataggatgrcccaatctga

SEQ ID NO: 18653 - DNA, 21 bp, Homo sapiens
ctgggaaatcrtggtctgatt

SEQ ID NO: 18654 - DNA, 21 bp, Homo sapiens
aggcttccttytttccttcca

SEQ ID NO: 18655 - DNA, 21 bp, Homo sapiens
aaagaagacayagcggggttc

SEQ ID NO: 18656 - DNA, 21 bp, Homo sapiens
agtagccccamgtctctatct

SEQ ID NO: 18657 - DNA, 21 bp, Homo sapiens
cgcggtatccrcgctcgctcg

SEQ ID NO: 18658 - DNA, 21 bp, Homo sapiens
gggaaggggtrggctctcttc

SEQ ID NO: 18659 - DNA, 21 bp, Homo sapiens
gtgacctcagrtggacagaga

SEQ ID NO: 18660 - DNA, 21 bp, Homo sapiens
cagccaccccrtcacctgttt

SEQ ID NO: 18661 - DNA, 21 bp, Homo sapiens
ttccttccacyaggacgacct

SEQ ID NO: 18662 - DNA, 21 bp, Homo sapiens
ttgggagcctyaggcccacgc

SEQ ID NO: 18663 - DNA, 21 bp, Homo sapiens
actccacggaragcccagacg

SEQ ID NO: 18664 - DNA, 21 bp, Homo sapiens
gaagtgggacrccccagcaca

SEQ ID NO: 18665 - DNA, 21 bp, Homo sapiens
ttccctggacrggctgttccc

SEQ ID NO: 18666 - DNA, 21 bp, Homo sapiens
ggtcacccgcraggtgaccgt

SEQ ID NO: 18667 - DNA, 21 bp, Homo sapiens
tatgctgaggycccacagact

SEQ ID NO: 18668 - DNA, 21 bp, Homo sapiens
tgtcagggccyccacccaccg

SEQ ID NO: 18669 - DNA, 21 bp, Homo sapiens
gtgggggcggrgctcggagtc

SEQ ID NO: 18670 - DNA, 21 bp, Homo sapiens
ccttcctgaayggggtccagg

SEQ ID NO: 18671 - DNA, 21 bp, Homo sapiens
cctcctctccmgccgggcgcg

SEQ ID NO: 18672 - DNA, 21 bp, Homo sapiens
tctgcttctcracctgtgttt

SEQ ID NO: 18673 - DNA, 21 bp, Homo sapiens
ttttttcttcrcccaaaggaa

SEQ ID NO: 18674 - DNA, 21 bp, Homo sapiens
ggaaagaaggyagccagtggg

SEQ ID NO: 18675 - DNA, 21 bp, Homo sapiens
aggagacagcrtttcccgggc

SEQ ID NO: 18676 - DNA, 21 bp, Homo sapiens
gaataataatrttagctaagg

SEQ ID NO: 18677 - DNA, 21 bp, Homo sapiens
caccttggcarctgtcaaagg

SEQ ID NO: 18678 - DNA, 21 bp, Homo sapiens
tgaattttgarcctggtgaat

SEQ ID NO: 18679 - DNA, 21 bp, Homo sapiens
cctcactcgtytcccctttga

SEQ ID NO: 18680 - DNA, 21 bp, Homo sapiens
ccgcggggccrcacacttccc

SEQ ID NO: 18681 - DNA, 21 bp, Homo sapiens
gctcgttactkgggggcccag

SEQ ID NO: 18682 - DNA, 21 bp, Homo sapiens
gaacagtatcytccgaggagt

SEQ ID NO: 18683 - DNA, 21 bp, Homo sapiens
ggcggggacgytggactggtc

SEQ ID NO: 18684 - DNA, 21 bp, Homo sapiens
cattggtgagkcctggactaa

SEQ ID NO: 18685 - DNA, 21 bp, Homo sapiens
ggtcacttccrtgcatttgtt

SEQ ID NO: 18686 - DNA, 21 bp, Homo sapiens
gtctgcgcgcygccttccacg

SEQ ID NO: 18687 - DNA, 21 bp, Homo sapiens
atgcccgtgcrcctctcagca

SEQ ID NO: 18688 - DNA, 21 bp, Homo sapiens
gcaggaaggaygcacaagccc

SEQ ID NO: 18689 - DNA, 21 bp, Homo sapiens
agcaggggccrttgtcaccct

SEQ ID NO: 18690 - DNA, 21 bp, Homo sapiens
ctctctgaagrcccccactcc

SEQ ID NO: 18691 - DNA, 21 bp, Homo sapiens
cctcattcccrctcggcaaca

SEQ ID NO: 18692 - DNA, 21 bp, Homo sapiens
caagcctctgrgtaagggcca

SEQ ID NO: 18693 - DNA, 21 bp, Homo sapiens
acgctacccarttcttgcaca

SEQ ID NO: 18694 - DNA, 21 bp, Homo sapiens
tgtttctgacycacaggaact

SEQ ID NO: 18695 - DNA, 21 bp, Homo sapiens
aaaacggcacytctcaccatc

SEQ ID NO: 18696 - DNA, 21 bp, Homo sapiens
ggggtattgcygagtgcttcg

SEQ ID NO: 18697 - DNA, 21 bp, Homo sapiens
attcccagccrctgtgaaatt

SEQ ID NO: 18698 - DNA, 21 bp, Homo sapiens
cctgagcataraagtcacatg

SEQ ID NO: 18699 - DNA, 21 bp, Homo sapiens
agatggcgacytggaagtgcg

SEQ ID NO: 18700 - DNA, 21 bp, Homo sapiens
caaggttcctrgaaatcagcc

SEQ ID NO: 18701 - DNA, 21 bp, Homo sapiens
attggtgtggygggaggcgta

SEQ ID NO: 18702 - DNA, 21 bp, Homo sapiens
tcaccttgggrtaacagggtc

SEQ ID NO: 18703 - DNA, 21 bp, Homo sapiens
tcccccatagyggtgtgccga

SEQ ID NO: 18704 - DNA, 21 bp, Homo sapiens
actgcccaccyggtttccaag

SEQ ID NO: 18705 - DNA, 21 bp, Homo sapiens
aggacgggctrccccatctca

SEQ ID NO: 18706 - DNA, 21 bp, Homo sapiens
caagcacagcygagctagttg

SEQ ID NO: 18707 - DNA, 21 bp, Homo sapiens
gtttattctayttgagatgtt

SEQ ID NO: 18708 - DNA, 21 bp, Homo sapiens
catagaacagygcctgttgcc

SEQ ID NO: 18709 - DNA, 21 bp, Homo sapiens
ctccagcccgkattcctagct

SEQ ID NO: 18710 - DNA, 21 bp, Homo sapiens
gccttggaatktggaactttg

SEQ ID NO: 18711 - DNA, 21 bp, Homo sapiens
cctggtgttgycctagaaacc

SEQ ID NO: 18712 - DNA, 21 bp, Homo sapiens
aaaacacataracacaatgtt

SEQ ID NO: 18713 - DNA, 21 bp, Homo sapiens
ccctgtctttygtcctccgtt

SEQ ID NO: 18714 - DNA, 21 bp, Homo sapiens
ccattgcccaygtggctccag

SEQ ID NO: 18715 - DNA, 21 bp, Homo sapiens
gaacagtattrttgggtcata

SEQ ID NO: 18716 - DNA, 21 bp, Homo sapiens
ttttttatagkgtcttgttct

SEQ ID NO: 18717 - DNA, 21 bp, Homo sapiens
cataaaacaaygtggccaccc

SEQ ID NO: 18718 - DNA, 21 bp, Homo sapiens
tgcaaaacacycttctaaata

SEQ ID NO: 18719 - DNA, 21 bp, Homo sapiens
agttattcctkattcttttac

SEQ ID NO: 18720 - DNA, 21 bp, Homo sapiens
ttacctctctmcatgctccta

SEQ ID NO: 18721 - DNA, 21 bp, Homo sapiens
tgttctgtagrtagaatgagt

SEQ ID NO: 18722 - DNA, 21 bp, Homo sapiens
gtagtggctckgttcggtctg

SEQ ID NO: 18723 - DNA, 21 bp, Homo sapiens
cagtactctcrctaacaactg

SEQ ID NO: 18724 - DNA, 21 bp, Homo sapiens
ttatgttagtkaggttattta

SEQ ID NO: 18725 - DNA, 21 bp, Homo sapiens
cataagtagtrgccactattg

SEQ ID NO: 18726 - DNA, 21 bp, Homo sapiens
catgacgtctrgcaataaagg

SEQ ID NO: 18727 - DNA, 21 bp, Homo sapiens
acctgtaatayggcaactgca

SEQ ID NO: 18728 - DNA, 21 bp, Homo sapiens
gagggagaaaragaggcacat

SEQ ID NO: 18729 - DNA, 21 bp, Homo sapiens
tcaaaacccayctgcaaggta

SEQ ID NO: 18730 - DNA, 21 bp, Homo sapiens
caagcattttrttatagcagt

SEQ ID NO: 18731 - DNA, 21 bp, Homo sapiens
tagaggatttyggtcaattgg

SEQ ID NO: 18732 - DNA, 21 bp, Homo sapiens
ggctgatggtyttcatggcta

SEQ ID NO: 18733 - DNA, 21 bp, Homo sapiens
atccatagggyctttcttctg

SEQ ID NO: 18734 - DNA, 21 bp, Homo sapiens
ttcttttctayaaattctccc

SEQ ID NO: 18735 - DNA, 21 bp, Homo sapiens
tccctcatacrtaatacatca

SEQ ID NO: 18736 - DNA, 21 bp, Homo sapiens
ccttccttcayttgaactctc

SEQ ID NO: 18737 - DNA, 21 bp, Homo sapiens
cacatcaagakcataaaaata

SEQ ID NO: 18738 - DNA, 21 bp, Homo sapiens
ttatagcacartgtacctctt

SEQ ID NO: 18739 - DNA, 21 bp, Homo sapiens
catcaccccaygccttcataa

SEQ ID NO: 18740 - DNA, 21 bp, Homo sapiens
gagaatgaagrgattaaatgg

SEQ ID NO: 18741 - DNA, 21 bp, Homo sapiens
ctaatagcatyttctataatt

SEQ ID NO: 18742 - DNA, 21 bp, Homo sapiens
aagggaaatayttgaaacccg

SEQ ID NO: 18743 - DNA, 21 bp, Homo sapiens
attcaataagratagtctttt

SEQ ID NO: 18744 - DNA, 21 bp, Homo sapiens
aatctgttgargttttatttt

SEQ ID NO: 18745 - DNA, 21 bp, Homo sapiens
atgatgtgcartaagacgcct

SEQ ID NO: 18746 - DNA, 21 bp, Homo sapiens
gggtgttctayaattcaattc

SEQ ID NO: 18747 - DNA, 21 bp, Homo sapiens
atgctgcccargctaaaatgg

SEQ ID NO: 18748 - DNA, 21 bp, Homo sapiens
aaagactcttytacaccctga

SEQ ID NO: 18749 - DNA, 21 bp, Homo sapiens
gcaggggcccracatcacact

SEQ ID NO: 18750 - DNA, 21 bp, Homo sapiens
tcccagccacygcagatcccg

SEQ ID NO: 18751 - DNA, 21 bp, Homo sapiens
tggctaatatytgtagttttc

SEQ ID NO: 18752 - DNA, 21 bp, Homo sapiens
tcttgtgggcrtgtcacatag

SEQ ID NO: 18753 - DNA, 21 bp, Homo sapiens
gcacatatgcrtaggaattat

SEQ ID NO: 18754 - DNA, 21 bp, Homo sapiens
cttctgcacaygaagagtatt

SEQ ID NO: 18755 - DNA, 21 bp, Homo sapiens
gttttgctttkttattctaaa

SEQ ID NO: 18756 - DNA, 21 bp, Homo sapiens
gatgcatctgrcctccccctt

SEQ ID NO: 18757 - DNA, 21 bp, Homo sapiens
aaactcaacakccagtggttt

SEQ ID NO: 18758 - DNA, 21 bp, Homo sapiens
acattttctarcaagcactct

SEQ ID NO: 18759 - DNA, 21 bp, Homo sapiens
aggaaataccygagagatcat

SEQ ID NO: 18760 - DNA, 21 bp, Homo sapiens
gtccagttgayattatcaagt

SEQ ID NO: 18761 - DNA, 21 bp, Homo sapiens
aagtataacaygaacaaaggc

SEQ ID NO: 18762 - DNA, 21 bp, Homo sapiens
gtgtttccccragttctatga

SEQ ID NO: 18763 - DNA, 21 bp, Homo sapiens
agaaatagtgyatcttaggaa

SEQ ID NO: 18764 - DNA, 21 bp, Homo sapiens
atatcttgtgyacacagttcc

SEQ ID NO: 18765 - DNA, 21 bp, Homo sapiens
atttgtatctrtgggccaagt

SEQ ID NO: 18766 - DNA, 21 bp, Homo sapiens
ccatgcctggraagaagtgag

SEQ ID NO: 18767 - DNA, 21 bp, Homo sapiens
gatagagtccrtagccataac

SEQ ID NO: 18768 - DNA, 21 bp, Homo sapiens
gataggctcargttaagaatt

SEQ ID NO: 18769 - DNA, 21 bp, Homo sapiens
tattgttagcrtaaattatct

SEQ ID NO: 18770 - DNA, 21 bp, Homo sapiens
ggagcattggyatccctgact

SEQ ID NO: 18771 - DNA, 21 bp, Homo sapiens
taatagtaggycccagtactt

SEQ ID NO: 18772 - DNA, 21 bp, Homo sapiens
ccagatgatayatgtttaaat

SEQ ID NO: 18773 - DNA, 21 bp, Homo sapiens
ttttctgcctyagcgagttca

SEQ ID NO: 18774 - DNA, 21 bp, Homo sapiens
tctagatcacrtgctaacttt

SEQ ID NO: 18775 - DNA, 21 bp, Homo sapiens
gtttatattayacgttttcat

SEQ ID NO: 18776 - DNA, 21 bp, Homo sapiens
tagaaaaatarttccagatgc

SEQ ID NO: 18777 - DNA, 21 bp, Homo sapiens
aatccagagtmccctaatgtg

SEQ ID NO: 18778 - DNA, 21 bp, Homo sapiens
attttataatratgctgtgaa

SEQ ID NO: 18779 - DNA, 21 bp, Homo sapiens
gtaggactgckgggtcacccc

SEQ ID NO: 18780 - DNA, 21 bp, Homo sapiens
agatgaatttyagggttggaa

SEQ ID NO: 18781 - DNA, 21 bp, Homo sapiens
tcagtggtagygggtggccag

SEQ ID NO: 18782 - DNA, 21 bp, Homo sapiens
ggcttccacgrtggttttata

SEQ ID NO: 18783 - DNA, 21 bp, Homo sapiens
acctcaggagkctggctcctg

SEQ ID NO: 18784 - DNA, 21 bp, Homo sapiens
gttgtctggtrctggcttccc

SEQ ID NO: 18785 - DNA, 21 bp, Homo sapiens
ttgtttctccrtgtgtcttta

SEQ ID NO: 18786 - DNA, 21 bp, Homo sapiens
ttctcagcttytttactgctc

SEQ ID NO: 18787 - DNA, 21 bp, Homo sapiens
ttaaggcaccrtagggacccc

SEQ ID NO: 18788 - DNA, 21 bp, Homo sapiens
tttttttctgmtgtattggtt

SEQ ID NO: 18789 - DNA, 21 bp, Homo sapiens
aatttaaatgkttctcctagt

SEQ ID NO: 18790 - DNA, 21 bp, Homo sapiens
taaaataaggraagtgagcca

SEQ ID NO: 18791 - DNA, 21 bp, Homo sapiens
ccccatcctgmagtcccagat

SEQ ID NO: 18792 - DNA, 21 bp, Homo sapiens
ctccaggaacractgacacaa

SEQ ID NO: 18793 - DNA, 21 bp, Homo sapiens
aattttcagcytatagattat

SEQ ID NO: 18794 - DNA, 21 bp, Homo sapiens
ccgaagcccayactctaagat

SEQ ID NO: 18795 - DNA, 21 bp, Homo sapiens
agtgctgtgamaccatcagaa

SEQ ID NO: 18796 - DNA, 21 bp, Homo sapiens
attttataagkaaggctgacc

SEQ ID NO: 18797 - DNA, 21 bp, Homo sapiens
cttcacatctrctttactttc

SEQ ID NO: 18798 - DNA, 21 bp, Homo sapiens
tgttctatccygtgagccttt

SEQ ID NO: 18799 - DNA, 21 bp, Homo sapiens
gataagtcaayacaggattca

SEQ ID NO: 18800 - DNA, 21 bp, Homo sapiens
ccacagtccaktggaggttgg

SEQ ID NO: 18801 - DNA, 21 bp, Homo sapiens
aggaacctcamatgcatgcag

SEQ ID NO: 18802 - DNA, 21 bp, Homo sapiens
gagtggaggcrttagatacat

SEQ ID NO: 18803 - DNA, 21 bp, Homo sapiens
attaaatatcrgcaaaatcat

SEQ ID NO: 18804 - DNA, 21 bp, Homo sapiens
aaacatcagakaattcatact

SEQ ID NO: 18805 - DNA, 21 bp, Homo sapiens
tttcatgaaayttgttgaagt

SEQ ID NO: 18806 - DNA, 21 bp, Homo sapiens
cacggttactkcggcttgggt

SEQ ID NO: 18807 - DNA, 21 bp, Homo sapiens
acctctcttcraacttgcttt

SEQ ID NO: 18808 - DNA, 21 bp, Homo sapiens
caagtggtttrggtgccaagg

SEQ ID NO: 18809 - DNA, 21 bp, Homo sapiens
cttagccaagkctataatgaa

SEQ ID NO: 18810 - DNA, 21 bp, Homo sapiens
caaatttgtaragacagacag

SEQ ID NO: 18811 - DNA, 21 bp, Homo sapiens
tgtcaaatgtyacagctactc

SEQ ID NO: 18812 - DNA, 21 bp, Homo sapiens
ttgggcccctrctttagaggc

SEQ ID NO: 18813 - DNA, 21 bp, Homo sapiens
tatggtaaaaygttatttcag

SEQ ID NO: 18814 - DNA, 21 bp, Homo sapiens
aaaaaactgtrttcttatctg

SEQ ID NO: 18815 - DNA, 21 bp, Homo sapiens
gaggtgatccratcagcatat

SEQ ID NO: 18816 - DNA, 21 bp, Homo sapiens
tctgattctcygatcatttaa

SEQ ID NO: 18817 - DNA, 21 bp, Homo sapiens
tcttttgtatrtcacaggagg

SEQ ID NO: 18818 - DNA, 21 bp, Homo sapiens
agtgcactctygctgtttgca

SEQ ID NO: 18819 - DNA, 21 bp, Homo sapiens
cctttgaccaycatctcccca

SEQ ID NO: 18820 - DNA, 21 bp, Homo sapiens
gacaggcattyactaatcact

SEQ ID NO: 18821 - DNA, 21 bp, Homo sapiens
gtagagataartgaggtggcc

SEQ ID NO: 18822 - DNA, 21 bp, Homo sapiens
aaactgaaaaygtataagcca

SEQ ID NO: 18823 - DNA, 21 bp, Homo sapiens
ctggagcctcytggacctccg

SEQ ID NO: 18824 - DNA, 21 bp, Homo sapiens
tttaaacaccyaaaggaagaa

SEQ ID NO: 18825 - DNA, 21 bp, Homo sapiens
ctttgttccaytgtattgctt

SEQ ID NO: 18826 - DNA, 21 bp, Homo sapiens
tttgcagtctkagaaaatgac

SEQ ID NO: 18827 - DNA, 21 bp, Homo sapiens
tgcgcgccccyagcaaaaaat

SEQ ID NO: 18828 - DNA, 21 bp, Homo sapiens
cccctccaaartcctcacaac

SEQ ID NO: 18829 - DNA, 21 bp, Homo sapiens
ccctaactttyacggctgtag

SEQ ID NO: 18830 - DNA, 21 bp, Homo sapiens
ttgcttttctytcctttttcc

SEQ ID NO: 18831 - DNA, 21 bp, Homo sapiens
gcatcaggagmaggacacaga

SEQ ID NO: 18832 - DNA, 21 bp, Homo sapiens
cggtatatacrtaagttctgc

SEQ ID NO: 18833 - DNA, 21 bp, Homo sapiens
taagtagggcmatttttgcgc

SEQ ID NO: 18834 - DNA, 21 bp, Homo sapiens
gacagcagctytgagaatagg

SEQ ID NO: 18835 - DNA, 21 bp, Homo sapiens
tcctgcagtayacctggcccc

SEQ ID NO: 18836 - DNA, 21 bp, Homo sapiens
cgttcatgatygtggtacaga

SEQ ID NO: 18837 - DNA, 21 bp, Homo sapiens
ccaggaagtaygagaaatgcc

SEQ ID NO: 18838 - DNA, 21 bp, Homo sapiens
tggataagttrcctcatcatc

SEQ ID NO: 18839 - DNA, 21 bp, Homo sapiens
catctctcacycacatatccc

SEQ ID NO: 18840 - DNA, 21 bp, Homo sapiens
actagaaggcrggggccttct

SEQ ID NO: 18841 - DNA, 21 bp, Homo sapiens
ctgtttgtaamatttgctcgt

SEQ ID NO: 18842 - DNA, 21 bp, Homo sapiens
gaaacaggccmaaatagatga

SEQ ID NO: 18843 - DNA, 21 bp, Homo sapiens
agacatataaygatgggattt

SEQ ID NO: 18844 - DNA, 21 bp, Homo sapiens
gaaatagaatkaaaaagaatt

SEQ ID NO: 18845 - DNA, 21 bp, Homo sapiens
taaccgccttmaagtatacaa

SEQ ID NO: 18846 - DNA, 21 bp, Homo sapiens
gctactgaaayttttctacca

SEQ ID NO: 18847 - DNA, 21 bp, Homo sapiens
ctctagtaacrtatatcagga

SEQ ID NO: 18848 - DNA, 21 bp, Homo sapiens
ttctggaccaratgtaggttg

SEQ ID NO: 18849 - DNA, 21 bp, Homo sapiens
acactgtaatrcagcacctcc

SEQ ID NO: 18850 - DNA, 21 bp, Homo sapiens
aggataacagmgatcttactc

SEQ ID NO: 18851 - DNA, 21 bp, Homo sapiens
agagttatttmatttgtttta

SEQ ID NO: 18852 - DNA, 21 bp, Homo sapiens
gctttttagtrtaggttaacc

SEQ ID NO: 18853 - DNA, 21 bp, Homo sapiens
gcagagcaaaygctaagtcaa

SEQ ID NO: 18854 - DNA, 21 bp, Homo sapiens
agagctggtgytatcccaata

SEQ ID NO: 18855 - DNA, 21 bp, Homo sapiens
tattctgtccrccacatgccc

SEQ ID NO: 18856 - DNA, 21 bp, Homo sapiens
gagttcagtgyaggcttggga

SEQ ID NO: 18857 - DNA, 21 bp, Homo sapiens
agtcagtcaaycaagcaagca

SEQ ID NO: 18858 - DNA, 21 bp, Homo sapiens
tttgatcaaayatatcaaatc

SEQ ID NO: 18859 - DNA, 21 bp, Homo sapiens
ggacttctgtraatagaggac

SEQ ID NO: 18860 - DNA, 21 bp, Homo sapiens
tagttgtgacrtgggactgtt

SEQ ID NO: 18861 - DNA, 21 bp, Homo sapiens
gaagaagggaraccaggcagg

SEQ ID NO: 18862 - DNA, 21 bp, Homo sapiens
ggtgtgcggcrtggcttggtg

SEQ ID NO: 18863 - DNA, 21 bp, Homo sapiens
taaatggttgyggtaatctca

SEQ ID NO: 18864 - DNA, 21 bp, Homo sapiens
gtgtgtgtagytattacttcg

SEQ ID NO: 18865 - DNA, 21 bp, Homo sapiens
tcttccgatgyggctgggcag

SEQ ID NO: 18866 - DNA, 21 bp, Homo sapiens
tggaatggacrgtcaggagac

SEQ ID NO: 18867 - DNA, 21 bp, Homo sapiens
gttgaatgagmggctcatggt

SEQ ID NO: 18868 - DNA, 21 bp, Homo sapiens
ttccaagattkattacccatt

SEQ ID NO: 18869 - DNA, 21 bp, Homo sapiens
tgtggtgacayggcaagatag

SEQ ID NO: 18870 - DNA, 21 bp, Homo sapiens
tcatgacaaaycttctattat

SEQ ID NO: 18871 - DNA, 21 bp, Homo sapiens
tggactccacmttaaactaaa

SEQ ID NO: 18872 - DNA, 21 bp, Homo sapiens
accatgtcatygcagaatgaa

SEQ ID NO: 18873 - DNA, 21 bp, Homo sapiens
gtgagtggtcrtgtaacctgt

SEQ ID NO: 18874 - DNA, 21 bp, Homo sapiens
tggttatgtaygattagctca

SEQ ID NO: 18875 - DNA, 21 bp, Homo sapiens
tgggaccttcygagccattta

SEQ ID NO: 18876 - DNA, 21 bp, Homo sapiens
ttgtctgcacrtcggcatcaa

SEQ ID NO: 18877 - DNA, 21 bp, Homo sapiens
tacaataaggygatgatgttg

SEQ ID NO: 18878 - DNA, 21 bp, Homo sapiens
aacttctagtmctgtggaaaa

SEQ ID NO: 18879 - DNA, 21 bp, Homo sapiens
tatgttggtcrtaatacatta

SEQ ID NO: 18880 - DNA, 21 bp, Homo sapiens
aaatagtcacrgcaacactca

SEQ ID NO: 18881 - DNA, 21 bp, Homo sapiens
cgctgggcctytcttcatttc

SEQ ID NO: 18882 - DNA, 21 bp, Homo sapiens
agaagatttgyttttccaggt

SEQ ID NO: 18883 - DNA, 21 bp, Homo sapiens
ggcagaggaargcatcctaga

SEQ ID NO: 18884 - DNA, 21 bp, Homo sapiens
atgtggctgaygtccttgtca

SEQ ID NO: 18885 - DNA, 21 bp, Homo sapiens
tgatctcaagygatgtctttt

SEQ ID NO: 18886 - DNA, 21 bp, Homo sapiens
aaggaaaaccytagaaatgaa

SEQ ID NO: 18887 - DNA, 21 bp, Homo sapiens
aggaactaccrctgtgatgtc

SEQ ID NO: 18888 - DNA, 21 bp, Homo sapiens
tttgcaggcamaacaatgtca

SEQ ID NO: 18889 - DNA, 21 bp, Homo sapiens
attagtaggcygggcacagct

SEQ ID NO: 18890 - DNA, 21 bp, Homo sapiens
attggtattgytacctgaagg

SEQ ID NO: 18891 - DNA, 21 bp, Homo sapiens
cacagaggccrcacattacag

SEQ ID NO: 18892 - DNA, 21 bp, Homo sapiens
cagccttccamtttccgtctc

SEQ ID NO: 18893 - DNA, 21 bp, Homo sapiens
gaaatcttagytccagtccca

SEQ ID NO: 18894 - DNA, 21 bp, Homo sapiens
ttacaaattaraatccaccag

SEQ ID NO: 18895 - DNA, 21 bp, Homo sapiens
gtaataatacrctcttcacag

SEQ ID NO: 18896 - DNA, 21 bp, Homo sapiens
gaattcccagrgatgactgta

SEQ ID NO: 18897 - DNA, 21 bp, Homo sapiens
aatggacgacrtgtgcttctt

SEQ ID NO: 18898 - DNA, 21 bp, Homo sapiens
tcaattcaacraacactttag

SEQ ID NO: 18899 - DNA, 21 bp, Homo sapiens
tgacttttagraaggttcatg

SEQ ID NO: 18900 - DNA, 21 bp, Homo sapiens
catgctcctcrtcaactcact

SEQ ID NO: 18901 - DNA, 21 bp, Homo sapiens
gtgacttttcrggatatgaac

SEQ ID NO: 18902 - DNA, 21 bp, Homo sapiens
tgcattgtagyagttttgcaa

SEQ ID NO: 18903 - DNA, 21 bp, Homo sapiens
aaatttcaacrggcaaatagt

SEQ ID NO: 18904 - DNA, 21 bp, Homo sapiens
ttcgtcttggytcatagagaa

SEQ ID NO: 18905 - DNA, 21 bp, Homo sapiens
gctgaagcctygaggacagag

SEQ ID NO: 18906 - DNA, 21 bp, Homo sapiens
ttccacatgcrtttgataatg

SEQ ID NO: 18907 - DNA, 21 bp, Homo sapiens
gatccttatcmgtcctggaag

SEQ ID NO: 18908 - DNA, 21 bp, Homo sapiens
tgggtcctctkgaggtgacta

SEQ ID NO: 18909 - DNA, 21 bp, Homo sapiens
gacgtgtattytgaattcctt

SEQ ID NO: 18910 - DNA, 21 bp, Homo sapiens
acactgattcygaaactctaa

SEQ ID NO: 18911 - DNA, 21 bp, Homo sapiens
gatatttgtartggatgaagg

SEQ ID NO: 18912 - DNA, 21 bp, Homo sapiens
aatcacattgyatggaagaga

SEQ ID NO: 18913 - DNA, 21 bp, Homo sapiens
atacaggacgytgggcttcat

SEQ ID NO: 18914 - DNA, 21 bp, Homo sapiens
tttcatcaaaraaagtcagga

SEQ ID NO: 18915 - DNA, 21 bp, Homo sapiens
actttaccgaygtggaatatg

SEQ ID NO: 18916 - DNA, 21 bp, Homo sapiens
aatattgtctrtggctcctga

SEQ ID NO: 18917 - DNA, 21 bp, Homo sapiens
cttttgaatcyggcttcttcc

SEQ ID NO: 18918 - DNA, 21 bp, Homo sapiens
gtatataatcrttggagaacc

SEQ ID NO: 18919 - DNA, 21 bp, Homo sapiens
agaggcagaakggtggaccct

SEQ ID NO: 18920 - DNA, 21 bp, Homo sapiens
ggggatgttartaacactacc

SEQ ID NO: 18921 - DNA, 21 bp, Homo sapiens
atgtttgtacrcaacagattt

SEQ ID NO: 18922 - DNA, 21 bp, Homo sapiens
ataaattctcmaagatgtttt

SEQ ID NO: 18923 - DNA, 21 bp, Homo sapiens
ataaactgctygatggtgagt

SEQ ID NO: 18924 - DNA, 21 bp, Homo sapiens
tgagtaatacmgtctgccacc

SEQ ID NO: 18925 - DNA, 21 bp, Homo sapiens
gatctgaatcyattcctcgct

SEQ ID NO: 18926 - DNA, 21 bp, Homo sapiens
gatgtctcgcrtggaatattt

SEQ ID NO: 18927 - DNA, 21 bp, Homo sapiens
ccaaggaacaygaaggtgttg

SEQ ID NO: 18928 - DNA, 21 bp, Homo sapiens
ggccaaaaaayatgctctggc

SEQ ID NO: 18929 - DNA, 21 bp, Homo sapiens
aggaggaggtrtgggtggaga

SEQ ID NO: 18930 - DNA, 21 bp, Homo sapiens
gaataacagcraccccaaggc

SEQ ID NO: 18931 - DNA, 21 bp, Homo sapiens
ctgcacagtgmaagagacatc

SEQ ID NO: 18932 - DNA, 21 bp, Homo sapiens
atcatgggccrtcggcggcac

SEQ ID NO: 18933 - DNA, 21 bp, Homo sapiens
aaagagaggayagccaaagac

SEQ ID NO: 18934 - DNA, 21 bp, Homo sapiens
ccctataattratattaaatc

SEQ ID NO: 18935 - DNA, 21 bp, Homo sapiens
agtgagcattrttgatagagt

SEQ ID NO: 18936 - DNA, 21 bp, Homo sapiens
gatgccacccrggattatcct

SEQ ID NO: 18937 - DNA, 21 bp, Homo sapiens
gtactcagatrctgggccatg

SEQ ID NO: 18938 - DNA, 21 bp, Homo sapiens
tagactccttkgtcgcctgtc

SEQ ID NO: 18939 - DNA, 21 bp, Homo sapiens
tagccctaagrggctgtaccc

SEQ ID NO: 18940 - DNA, 21 bp, Homo sapiens
tagatattctrtattccataa

SEQ ID NO: 18941 - DNA, 21 bp, Homo sapiens
tgtgtacactrtacagtttgt

SEQ ID NO: 18942 - DNA, 21 bp, Homo sapiens
gtcagttgttrttccatagga

SEQ ID NO: 18943 - DNA, 21 bp, Homo sapiens
ccctttacctrtcaattaacc

SEQ ID NO: 18944 - DNA, 21 bp, Homo sapiens
ctgttatgggycctggggaat

SEQ ID NO: 18945 - DNA, 21 bp, Homo sapiens
gtcatgaaagrgccttttctc

SEQ ID NO: 18946 - DNA, 21 bp, Homo sapiens
atcacagaatyagctcttctt

SEQ ID NO: 18947 - DNA, 21 bp, Homo sapiens
gggagtagggragaaaggggc

SEQ ID NO: 18948 - DNA, 21 bp, Homo sapiens
gagactctgcrgggacaaatc

SEQ ID NO: 18949 - DNA, 21 bp, Homo sapiens
tccatcacctyatcacttaga

SEQ ID NO: 18950 - DNA, 21 bp, Homo sapiens
ataaatctatrcttttgttat

SEQ ID NO: 18951 - DNA, 21 bp, Homo sapiens
caccccaggtrctgaggacaa

SEQ ID NO: 18952 - DNA, 21 bp, Homo sapiens
tgatcaaatayggcgaccgtc

SEQ ID NO: 18953 - DNA, 21 bp, Homo sapiens
gacttcagcarcagcccgatg

SEQ ID NO: 18954 - DNA, 21 bp, Homo sapiens
gatgaatcagrttccccagga

SEQ ID NO: 18955 - DNA, 21 bp, Homo sapiens
tgtctacagtrgttggggaga

SEQ ID NO: 18956 - DNA, 21 bp, Homo sapiens
ccagcctccarcccagagctg

SEQ ID NO: 18957 - DNA, 21 bp, Homo sapiens
ggaggaagggrcatgattggg

SEQ ID NO: 18958 - DNA, 21 bp, Homo sapiens
tttggtctctrttggtgtgga

SEQ ID NO: 18959 - DNA, 21 bp, Homo sapiens
ggattcagcaytaacagcctc

SEQ ID NO: 18960 - DNA, 21 bp, Homo sapiens
cctgcccatgygtcctttgtc

SEQ ID NO: 18961 - DNA, 21 bp, Homo sapiens
ttctgaatccyctcactctgg

SEQ ID NO: 18962 - DNA, 21 bp, Homo sapiens
ccttagaggcrtctctatctg

SEQ ID NO: 18963 - DNA, 21 bp, Homo sapiens
catttggtaartgttagtgtt

SEQ ID NO: 18964 - DNA, 21 bp, Homo sapiens
cgcaggctttytcttgtgcac

SEQ ID NO: 18965 - DNA, 21 bp, Homo sapiens
tctctcccctkggggcgggtc

SEQ ID NO: 18966 - DNA, 21 bp, Homo sapiens
aggattctagrggcaaacgat

SEQ ID NO: 18967 - DNA, 21 bp, Homo sapiens
atgagaataaygtccacaaga

SEQ ID NO: 18968 - DNA, 21 bp, Homo sapiens
tggcctctgcytcttcttatg

SEQ ID NO: 18969 - DNA, 21 bp, Homo sapiens
cccaaaggacrttcaggaaat

SEQ ID NO: 18970 - DNA, 21 bp, Homo sapiens
ttaattactcyacaccatctt

SEQ ID NO: 18971 - DNA, 21 bp, Homo sapiens
cagttcagctyataacactgt

SEQ ID NO: 18972 - DNA, 21 bp, Homo sapiens
agttgaacccyctgcacttcc

SEQ ID NO: 18973 - DNA, 21 bp, Homo sapiens
gtaggctgggkcagaggagca

SEQ ID NO: 18974 - DNA, 21 bp, Homo sapiens
gttccatcccrcactggctat

SEQ ID NO: 18975 - DNA, 21 bp, Homo sapiens
gacctcaccckacctggcctc

SEQ ID NO: 18976 - DNA, 21 bp, Homo sapiens
ctttgagtccrgcgtgatctc

SEQ ID NO: 18977 - DNA, 21 bp, Homo sapiens
gccacttgagratctggatgg

SEQ ID NO: 18978 - DNA, 21 bp, Homo sapiens
aatgatataargcagaaacta

SEQ ID NO: 18979 - DNA, 21 bp, Homo sapiens
ttaagagaccygaaggatgag

SEQ ID NO: 18980 - DNA, 21 bp, Homo sapiens
actattacacraacgcttcca

SEQ ID NO: 18981 - DNA, 21 bp, Homo sapiens
gaatttttgcrtatgaataca

SEQ ID NO: 18982 - DNA, 21 bp, Homo sapiens
tttcatatgtrcaaagcactg

SEQ ID NO: 18983 - DNA, 21 bp, Homo sapiens
catcacttttkcatatcccat

SEQ ID NO: 18984 - DNA, 21 bp, Homo sapiens
gctctactgayatctggtggg

SEQ ID NO: 18985 - DNA, 21 bp, Homo sapiens
attgctatggmcgaaccaaga

SEQ ID NO: 18986 - DNA, 21 bp, Homo sapiens
agatagttttyatttgctctt

SEQ ID NO: 18987 - DNA, 21 bp, Homo sapiens
gagcacactcrtgagttgatg

SEQ ID NO: 18988 - DNA, 21 bp, Homo sapiens
ctgttgcacakgtaaagtgcc

SEQ ID NO: 18989 - DNA, 21 bp, Homo sapiens
agagatggcaygtgagcttca

SEQ ID NO: 18990 - DNA, 21 bp, Homo sapiens
ccttggctttkccccattact

SEQ ID NO: 18991 - DNA, 21 bp, Homo sapiens
caggaaaggcragaggtcact

SEQ ID NO: 18992 - DNA, 21 bp, Homo sapiens
ttaatatccaytcacagatat

SEQ ID NO: 18993 - DNA, 21 bp, Homo sapiens
agctaggtgcyagtgtggttc

SEQ ID NO: 18994 - DNA, 21 bp, Homo sapiens
aatctcatctygttgtagaat

SEQ ID NO: 18995 - DNA, 21 bp, Homo sapiens
cagtatttacrgaggatgtac

SEQ ID NO: 18996 - DNA, 21 bp, Homo sapiens
agatggtagcrctagggccag

SEQ ID NO: 18997 - DNA, 21 bp, Homo sapiens
tatgactactkgctttatatt

SEQ ID NO: 18998 - DNA, 21 bp, Homo sapiens
agcccatgtaytaataaactc

SEQ ID NO: 18999 - DNA, 21 bp, Homo sapiens
attaatttgayagaaacaaat

SEQ ID NO: 19000 - DNA, 21 bp, Homo sapiens
gctgctcaacraatatacagt

SEQ ID NO: 19001 - DNA, 21 bp, Homo sapiens
tttttatgaaygtcaggattg

SEQ ID NO: 19002 - DNA, 21 bp, Homo sapiens
ttttagtacaractgaatatt

SEQ ID NO: 19003 - DNA, 21 bp, Homo sapiens
tttgcactgtmccccagggtg

SEQ ID NO: 19004 - DNA, 21 bp, Homo sapiens
ttgttctttartaagtgattt

SEQ ID NO: 19005 - DNA, 21 bp, Homo sapiens
gtttaaaatcmccacccagac

SEQ ID NO: 19006 - DNA, 21 bp, Homo sapiens
tcacaaattcygaagtggtag

SEQ ID NO: 19007 - DNA, 21 bp, Homo sapiens
tttgcaaggcyatctgagagg

SEQ ID NO: 19008 - DNA, 21 bp, Homo sapiens
gaaattatgcycaataaggaa

SEQ ID NO: 19009 - DNA, 21 bp, Homo sapiens
ttaatgttaaraggaaaagtg

SEQ ID NO: 19010 - DNA, 21 bp, Homo sapiens
tagggagctayagacacaagc

SEQ ID NO: 19011 - DNA, 21 bp, Homo sapiens
aaagatgttayacaacaccta

SEQ ID NO: 19012 - DNA, 21 bp, Homo sapiens
ccttatcttcrtttggaggac

SEQ ID NO: 19013 - DNA, 21 bp, Homo sapiens
tgaaaaacaaygcttattcat

SEQ ID NO: 19014 - DNA, 21 bp, Homo sapiens
gtttacttggrtttgccaact

SEQ ID NO: 19015 - DNA, 21 bp, Homo sapiens
tgcccgggttygatacccagt

SEQ ID NO: 19016 - DNA, 21 bp, Homo sapiens
tctctgaaccytgagctgggt

SEQ ID NO: 19017 - DNA, 21 bp, Homo sapiens
atctctgcacytttacaaccc

SEQ ID NO: 19018 - DNA, 21 bp, Homo sapiens
atgtcttcccytttcaagcct

SEQ ID NO: 19019 - DNA, 21 bp, Homo sapiens
atgtcttgaayacttctggca

SEQ ID NO: 19020 - DNA, 21 bp, Homo sapiens
cttgtggcatycacgccttgt

SEQ ID NO: 19021 - DNA, 21 bp, Homo sapiens
atagtattgcrtgaagtgcct

SEQ ID NO: 19022 - DNA, 21 bp, Homo sapiens
caatgttaatktagttcagca

SEQ ID NO: 19023 - DNA, 21 bp, Homo sapiens
tctgtctttcmaagagtataa

SEQ ID NO: 19024 - DNA, 21 bp, Homo sapiens
cagggtcacamtagctgggac

SEQ ID NO: 19025 - DNA, 21 bp, Homo sapiens
tggtgtggttyagaggtacat

SEQ ID NO: 19026 - DNA, 21 bp, Homo sapiens
aaagatagaaragagactgct

SEQ ID NO: 19027 - DNA, 21 bp, Homo sapiens
tagtgccccayagccaaatct

SEQ ID NO: 19028 - DNA, 21 bp, Homo sapiens
gtgagaaaaaygccttgcaaa

SEQ ID NO: 19029 - DNA, 21 bp, Homo sapiens
cctcctgcccrtatattcacg

SEQ ID NO: 19030 - DNA, 21 bp, Homo sapiens
aggattcaccraccttggaca

SEQ ID NO: 19031 - DNA, 21 bp, Homo sapiens
cccagtacttraggtacagca

SEQ ID NO: 19032 - DNA, 21 bp, Homo sapiens
gatattctccrttaaatattc

SEQ ID NO: 19033 - DNA, 21 bp, Homo sapiens
tagtatgctaygttaggttag

SEQ ID NO: 19034 - DNA, 21 bp, Homo sapiens
ttttgacagargttgttagtt

SEQ ID NO: 19035 - DNA, 21 bp, Homo sapiens
aaacttcttgmctctcagaag

SEQ ID NO: 19036 - DNA, 21 bp, Homo sapiens
ccaaggtgccmccacctcctg

SEQ ID NO: 19037 - DNA, 21 bp, Homo sapiens
acaacttgctygcattgcaaa

SEQ ID NO: 19038 - DNA, 21 bp, Homo sapiens
ctgcactctgygttttaacaa

SEQ ID NO: 19039 - DNA, 21 bp, Homo sapiens
acatcccggcrgagagacaga

SEQ ID NO: 19040 - DNA, 21 bp, Homo sapiens
cttcctctggrtcaggtcagg

SEQ ID NO: 19041 - DNA, 21 bp, Homo sapiens
gcgggtcccartggaggcgaa

SEQ ID NO: 19042 - DNA, 21 bp, Homo sapiens
cttcaagcacrggctgcaagg

SEQ ID NO: 19043 - DNA, 21 bp, Homo sapiens
aaggctcatayctcctgtttt

SEQ ID NO: 19044 - DNA, 21 bp, Homo sapiens
atagagggcamattttctgct

SEQ ID NO: 19045 - DNA, 21 bp, Homo sapiens
tcttgcaaccrtaagtacaca

SEQ ID NO: 19046 - DNA, 21 bp, Homo sapiens
aaaccgcccarcagccgcttg

SEQ ID NO: 19047 - DNA, 21 bp, Homo sapiens
tgccactcccrtgaagtggtg

SEQ ID NO: 19048 - DNA, 21 bp, Homo sapiens
catcctttcayggtcacaaat

SEQ ID NO: 19049 - DNA, 21 bp, Homo sapiens
gagtgactttygagttacttt

SEQ ID NO: 19050 - DNA, 21 bp, Homo sapiens
tccttattctyacacccaaag

SEQ ID NO: 19051 - DNA, 21 bp, Homo sapiens
tacagccaccmagttaaataa

SEQ ID NO: 19052 - DNA, 21 bp, Homo sapiens
tctgcgattcyatgaaagagc

SEQ ID NO: 19053 - DNA, 21 bp, Homo sapiens
cacctggaccyagccaccttc

SEQ ID NO: 19054 - DNA, 21 bp, Homo sapiens
gaatagggagrcaacaggagc

SEQ ID NO: 19055 - DNA, 21 bp, Homo sapiens
tgtgggccccrgaatcaggcc

SEQ ID NO: 19056 - DNA, 21 bp, Homo sapiens
agaccacatamtgtatgattc

SEQ ID NO: 19057 - DNA, 21 bp, Homo sapiens
acccgtgacamaaactgactc

SEQ ID NO: 19058 - DNA, 21 bp, Homo sapiens
taattcttccyctttcctctg

SEQ ID NO: 19059 - DNA, 21 bp, Homo sapiens
ttggtaaagaygaatcctgtc

SEQ ID NO: 19060 - DNA, 21 bp, Homo sapiens
tctgcctgagmacctcagaga

SEQ ID NO: 19061 - DNA, 21 bp, Homo sapiens
ctctaaaatcrtctaggcccc

SEQ ID NO: 19062 - DNA, 21 bp, Homo sapiens
acacgcctacraagaatgctg

SEQ ID NO: 19063 - DNA, 21 bp, Homo sapiens
attttctagtktatgtaaaat

SEQ ID NO: 19064 - DNA, 21 bp, Homo sapiens
ataacactttrtaatttctag

SEQ ID NO: 19065 - DNA, 21 bp, Homo sapiens
cccacaggggractggagggt

SEQ ID NO: 19066 - DNA, 21 bp, Homo sapiens
tgctggaaatrgttggcaatc

SEQ ID NO: 19067 - DNA, 21 bp, Homo sapiens
aaaactccttytggagacaga

SEQ ID NO: 19068 - DNA, 21 bp, Homo sapiens
cctcggtcctrccctcattcc

SEQ ID NO: 19069 - DNA, 21 bp, Homo sapiens
gggccaagtcyataaggggtt

SEQ ID NO: 19070 - DNA, 21 bp, Homo sapiens
gctcactcctytcccacccac

SEQ ID NO: 19071 - DNA, 21 bp, Homo sapiens
aagttaaataraggactgggt

SEQ ID NO: 19072 - DNA, 21 bp, Homo sapiens
ctcagcctcakatgacttgtc

SEQ ID NO: 19073 - DNA, 21 bp, Homo sapiens
gacagccatcragggtcttcc

SEQ ID NO: 19074 - DNA, 21 bp, Homo sapiens
ttcttaaaggrtagcacatgt

SEQ ID NO: 19075 - DNA, 21 bp, Homo sapiens
tttaaggtttytgttttctta

SEQ ID NO: 19076 - DNA, 21 bp, Homo sapiens
gcaaagccccrgaaggatcaa

SEQ ID NO: 19077 - DNA, 21 bp, Homo sapiens
atttttattaygaaagaaaac

SEQ ID NO: 19078 - DNA, 21 bp, Homo sapiens
ctgggagtgcygctgagaggg

SEQ ID NO: 19079 - DNA, 21 bp, Homo sapiens
tacccaacccragggaggaag

SEQ ID NO: 19080 - DNA, 21 bp, Homo sapiens
caatcggaacrcagatcccca

SEQ ID NO: 19081 - DNA, 21 bp, Homo sapiens
agaagcatctrgatttggcct

SEQ ID NO: 19082 - DNA, 21 bp, Homo sapiens
ttcacccaccratgagacaga

SEQ ID NO: 19083 - DNA, 21 bp, Homo sapiens
aagtgtggaaracgagggatg

SEQ ID NO: 19084 - DNA, 21 bp, Homo sapiens
tgtaacaaacrcagctggcct

SEQ ID NO: 19085 - DNA, 21 bp, Homo sapiens
ccctaggcccrggtaacaggc

SEQ ID NO: 19086 - DNA, 21 bp, Homo sapiens
gcatccaagargcatttcaag

SEQ ID NO: 19087 - DNA, 21 bp, Homo sapiens
ctgcctctctrctactcatat

SEQ ID NO: 19088 - DNA, 21 bp, Homo sapiens
tctgtgcctcrctttcctcat

SEQ ID NO: 19089 - DNA, 21 bp, Homo sapiens
gggaaccaagrgctgtagttg

SEQ ID NO: 19090 - DNA, 21 bp, Homo sapiens
aagcagaaatrtatttatgta

SEQ ID NO: 19091 - DNA, 21 bp, Homo sapiens
ctaccccctakgaagggcacc

SEQ ID NO: 19092 - DNA, 21 bp, Homo sapiens
ctgggcatccrtcatcacata

SEQ ID NO: 19093 - DNA, 21 bp, Homo sapiens
tgtctgccggmacgacctccc

SEQ ID NO: 19094 - DNA, 21 bp, Homo sapiens
accatcgctaycctccacacc

SEQ ID NO: 19095 - DNA, 21 bp, Homo sapiens
tgggcacaagmagccactgct

SEQ ID NO: 19096 - DNA, 21 bp, Homo sapiens
gctggtccagrccaggagctg

SEQ ID NO: 19097 - DNA, 21 bp, Homo sapiens
tgctccatctraaccaagcac

SEQ ID NO: 19098 - DNA, 21 bp, Homo sapiens
actgagaaatmaaataagaaa

SEQ ID NO: 19099 - DNA, 21 bp, Homo sapiens
ggtccctcccrgggtttgggt

SEQ ID NO: 19100 - DNA, 21 bp, Homo sapiens
tcattgttcarcacacatcca

SEQ ID NO: 19101 - DNA, 21 bp, Homo sapiens
tcatttggttkctcatgtaaa

SEQ ID NO: 19102 - DNA, 21 bp, Homo sapiens
ttggattagcrcccccagtga

SEQ ID NO: 19103 - DNA, 21 bp, Homo sapiens
gtatctaaacmtagtaggacc

SEQ ID NO: 19104 - DNA, 21 bp, Homo sapiens
tattatgctaygagattttgg

SEQ ID NO: 19105 - DNA, 21 bp, Homo sapiens
atgttctggaragccaaaatt

SEQ ID NO: 19106 - DNA, 21 bp, Homo sapiens
cagagagagaragagagagga

SEQ ID NO: 19107 - DNA, 21 bp, Homo sapiens
aggtgtgggcrgctatgtgac

SEQ ID NO: 19108 - DNA, 21 bp, Homo sapiens
tcccacatagraaaagccacc

SEQ ID NO: 19109 - DNA, 21 bp, Homo sapiens
ggtgcagcaayatcatagtca

SEQ ID NO: 19110 - DNA, 21 bp, Homo sapiens
agctacagtaraagtatttcc

SEQ ID NO: 19111 - DNA, 21 bp, Homo sapiens
tgacacagctmaaaatcaatc

SEQ ID NO: 19112 - DNA, 21 bp, Homo sapiens
tactaggtaaktggcctccac

SEQ ID NO: 19113 - DNA, 21 bp, Homo sapiens
ttatattcacmaatggtaggg

SEQ ID NO: 19114 - DNA, 21 bp, Homo sapiens
aaaccatcagytgatttttat

SEQ ID NO: 19115 - DNA, 21 bp, Homo sapiens
ggaaaaataartacctgactg

SEQ ID NO: 19116 - DNA, 21 bp, Homo sapiens
agagaagtcarcacctggcag

SEQ ID NO: 19117 - DNA, 21 bp, Homo sapiens
aattaccaggyagacccaaag

SEQ ID NO: 19118 - DNA, 21 bp, Homo sapiens
agatcatttartgagacattt

SEQ ID NO: 19119 - DNA, 21 bp, Homo sapiens
cacgagcactrtcttcaatac

SEQ ID NO: 19120 - DNA, 21 bp, Homo sapiens
aagaaagatgrggaagggaga

SEQ ID NO: 19121 - DNA, 21 bp, Homo sapiens
ctgatacatgrtaagtgacaa

SEQ ID NO: 19122 - DNA, 21 bp, Homo sapiens
gtcccttgctrggcagtccca

SEQ ID NO: 19123 - DNA, 21 bp, Homo sapiens
aggccaatgcyctccagcgtc

SEQ ID NO: 19124 - DNA, 21 bp, Homo sapiens
aaagtggattytgtgcactca

SEQ ID NO: 19125 - DNA, 21 bp, Homo sapiens
aacaatgtagkgtaagttttt

SEQ ID NO: 19126 - DNA, 21 bp, Homo sapiens
acagcttgacrtaattacctg

SEQ ID NO: 19127 - DNA, 21 bp, Homo sapiens
taatgagcaaygcttctgctc

SEQ ID NO: 19128 - DNA, 21 bp, Homo sapiens
gagatcatccrcaggttggga

SEQ ID NO: 19129 - DNA, 21 bp, Homo sapiens
cctgtctacayctgaaattac

SEQ ID NO: 19130 - DNA, 21 bp, Homo sapiens
gatctctttgytcaggcttct

SEQ ID NO: 19131 - DNA, 21 bp, Homo sapiens
caggatggacmactctgtctc

SEQ ID NO: 19132 - DNA, 21 bp, Homo sapiens
gcttgctaccrtgcagacctg

SEQ ID NO: 19133 - DNA, 21 bp, Homo sapiens
ccagccactgrtcttggggag

SEQ ID NO: 19134 - DNA, 21 bp, Homo sapiens
aggcacccgcmctgtccccgt

SEQ ID NO: 19135 - DNA, 21 bp, Homo sapiens
ggccacgactygaacagaccc

SEQ ID NO: 19136 - DNA, 21 bp, Homo sapiens
tttgcccactrtgacccccag

SEQ ID NO: 19137 - DNA, 21 bp, Homo sapiens
ttatgggatcytcccactgac

SEQ ID NO: 19138 - DNA, 21 bp, Homo sapiens
agctggtattrcaagagttaa

SEQ ID NO: 19139 - DNA, 21 bp, Homo sapiens
actgggagccyccagaccatc

SEQ ID NO: 19140 - DNA, 21 bp, Homo sapiens
cttgtctggtyaacttcgcgc

SEQ ID NO: 19141 - DNA, 21 bp, Homo sapiens
aggaggacccrttgttctcac

SEQ ID NO: 19142 - DNA, 21 bp, Homo sapiens
gcctttccccyccaggggtga

SEQ ID NO: 19143 - DNA, 21 bp, Homo sapiens
cttcccagggkaatgatgcgg

SEQ ID NO: 19144 - DNA, 21 bp, Homo sapiens
gcacaattacrctggcaaaga

SEQ ID NO: 19145 - DNA, 21 bp, Homo sapiens
ggaagttgccmtgcctgggca

SEQ ID NO: 19146 - DNA, 21 bp, Homo sapiens
taaatgttcaygaatactgcc

SEQ ID NO: 19147 - DNA, 21 bp, Homo sapiens
attcactacayaagtatttct

SEQ ID NO: 19148 - DNA, 21 bp, Homo sapiens
ttgatttccarggttgcctgc

SEQ ID NO: 19149 - DNA, 21 bp, Homo sapiens
tggtcactgtmtacctttgtt

SEQ ID NO: 19150 - DNA, 21 bp, Homo sapiens
ggcccagtgartaaatggtgg

SEQ ID NO: 19151 - DNA, 21 bp, Homo sapiens
ggcaagatctygcaacattta

SEQ ID NO: 19152 - DNA, 21 bp, Homo sapiens
ctctgtttatrctctgagcct

SEQ ID NO: 19153 - DNA, 21 bp, Homo sapiens
gagagtgtggrtatttattct

SEQ ID NO: 19154 - DNA, 21 bp, Homo sapiens
tagccctgaaytgttaattac

SEQ ID NO: 19155 - DNA, 21 bp, Homo sapiens
ggagctcagtkcctggccgga

SEQ ID NO: 19156 - DNA, 21 bp, Homo sapiens
gatggtgcctkgtaaatgcct

SEQ ID NO: 19157 - DNA, 21 bp, Homo sapiens
gtagcgatagrcctcgctgca

SEQ ID NO: 19158 - DNA, 21 bp, Homo sapiens
actgctcttcrtcgctgccgt

SEQ ID NO: 19159 - DNA, 21 bp, Homo sapiens
acactcagggygcaggttgaa

SEQ ID NO: 19160 - DNA, 21 bp, Homo sapiens
gcaggttttgrtgtctgtttg

SEQ ID NO: 19161 - DNA, 21 bp, Homo sapiens
atgaggtcctyggggccctgc

SEQ ID NO: 19162 - DNA, 21 bp, Homo sapiens
tagccattccragttctgtca

SEQ ID NO: 19163 - DNA, 21 bp, Homo sapiens
aagcatttgcrcagcgtggga

SEQ ID NO: 19164 - DNA, 21 bp, Homo sapiens
aacagagagcyggcttcagag

SEQ ID NO: 19165 - DNA, 21 bp, Homo sapiens
tcttcacacaygagcatgatg

SEQ ID NO: 19166 - DNA, 21 bp, Homo sapiens
ttcctagaggrtggccagagg

SEQ ID NO: 19167 - DNA, 21 bp, Homo sapiens
cacgagcccayaaccggatgc

SEQ ID NO: 19168 - DNA, 21 bp, Homo sapiens
tggcagagagyctgacatgta

SEQ ID NO: 19169 - DNA, 21 bp, Homo sapiens
acacacagcgyacatcagatc

SEQ ID NO: 19170 - DNA, 21 bp, Homo sapiens
cttatttaacyccatagaatg

SEQ ID NO: 19171 - DNA, 21 bp, Homo sapiens
cttacctgtcrgtgactttgt

SEQ ID NO: 19172 - DNA, 21 bp, Homo sapiens
cctaagtctcrttcctggctt

SEQ ID NO: 19173 - DNA, 21 bp, Homo sapiens
ggaggaaagamagcaaattgg

SEQ ID NO: 19174 - DNA, 21 bp, Homo sapiens
tttctggacgmagtttgcaaa

SEQ ID NO: 19175 - DNA, 21 bp, Homo sapiens
gctatttcttmtagcttttca

SEQ ID NO: 19176 - DNA, 21 bp, Homo sapiens
ccagttcaaaygctaatctct

SEQ ID NO: 19177 - DNA, 21 bp, Homo sapiens
ctctgcttttyggctactatg

SEQ ID NO: 19178 - DNA, 21 bp, Homo sapiens
gcaacacccaygggctccagg

SEQ ID NO: 19179 - DNA, 21 bp, Homo sapiens
tgatgtttaaygaatgcctct

SEQ ID NO: 19180 - DNA, 21 bp, Homo sapiens
agtcactttcygcctctgagc

SEQ ID NO: 19181 - DNA, 21 bp, Homo sapiens
tcagagggtcyagctcaccag

SEQ ID NO: 19182 - DNA, 21 bp, Homo sapiens
tggctggcacrctctggtttg

SEQ ID NO: 19183 - DNA, 21 bp, Homo sapiens
gagctgctccrgtgggctgat

SEQ ID NO: 19184 - DNA, 21 bp, Homo sapiens
cgcaagaatcytagaacagag

SEQ ID NO: 19185 - DNA, 21 bp, Homo sapiens
ctatggtcacrttcctggtga

SEQ ID NO: 19186 - DNA, 21 bp, Homo sapiens
aatgcttatcmtccgtttacc

SEQ ID NO: 19187 - DNA, 21 bp, Homo sapiens
tagcttgaackgtggatagca

SEQ ID NO: 19188 - DNA, 21 bp, Homo sapiens
ctcaaaatccrgccattagca

SEQ ID NO: 19189 - DNA, 21 bp, Homo sapiens
tccagagataytggattgcaa

SEQ ID NO: 19190 - DNA, 21 bp, Homo sapiens
taaataaattmttcacagtac

SEQ ID NO: 19191 - DNA, 21 bp, Homo sapiens
atgaatattayggagcaacgt

SEQ ID NO: 19192 - DNA, 21 bp, Homo sapiens
gttcaacatgytgggctatct

SEQ ID NO: 19193 - DNA, 21 bp, Homo sapiens
cctggaagcargacacccttg

SEQ ID NO: 19194 - DNA, 21 bp, Homo sapiens
ggattcacacygaagtgtttg

SEQ ID NO: 19195 - DNA, 21 bp, Homo sapiens
ctaatataatrcttcagtttt

SEQ ID NO: 19196 - DNA, 21 bp, Homo sapiens
attagcactcrtgatgtaatt

SEQ ID NO: 19197 - DNA, 21 bp, Homo sapiens
gcgactcctcrgtgtcttctt

SEQ ID NO: 19198 - DNA, 21 bp, Homo sapiens
aacagagatgraggtacaaag

SEQ ID NO: 19199 - DNA, 21 bp, Homo sapiens
tggttgaaggragtgtggtaa

SEQ ID NO: 19200 - DNA, 21 bp, Homo sapiens
aaaaagagaarctatctatgg

SEQ ID NO: 19201 - DNA, 21 bp, Homo sapiens
ttttgctaacrtctctaagtc

SEQ ID NO: 19202 - DNA, 21 bp, Homo sapiens
tgaaaaggggkcttcatcctt

SEQ ID NO: 19203 - DNA, 21 bp, Homo sapiens
aactagcatcrgcagaccttg

SEQ ID NO: 19204 - DNA, 21 bp, Homo sapiens
gcccatctttrcagcaagtct

SEQ ID NO: 19205 - DNA, 21 bp, Homo sapiens
aaaaatgtagrtttttccatc

SEQ ID NO: 19206 - DNA, 21 bp, Homo sapiens
caaaatggctyacacctgtaa

SEQ ID NO: 19207 - DNA, 21 bp, Homo sapiens
gcactggcttrtctattcttc

SEQ ID NO: 19208 - DNA, 21 bp, Homo sapiens
tggtctctcgkctcaccttca

SEQ ID NO: 19209 - DNA, 21 bp, Homo sapiens
gactgtaggaygcttcacgct

SEQ ID NO: 19210 - DNA, 21 bp, Homo sapiens
agtgaacctgycttgaaatac

SEQ ID NO: 19211 - DNA, 21 bp, Homo sapiens
gaaagggccayccacccagga

SEQ ID NO: 19212 - DNA, 21 bp, Homo sapiens
gagcttcactrtgatgtgggg

SEQ ID NO: 19213 - DNA, 21 bp, Homo sapiens
tctctctgacrttttgcatgt

SEQ ID NO: 19214 - DNA, 21 bp, Homo sapiens
cgctgctctargtagcagtcc

SEQ ID NO: 19215 - DNA, 21 bp, Homo sapiens
tgttcttgatkaaagaagaga

SEQ ID NO: 19216 - DNA, 21 bp, Homo sapiens
tttattctagrgacttatgtg

SEQ ID NO: 19217 - DNA, 21 bp, Homo sapiens
cctggtggttrgtgctggagg

SEQ ID NO: 19218 - DNA, 21 bp, Homo sapiens
cttggcaaaaytgcagttgtg

SEQ ID NO: 19219 - DNA, 21 bp, Homo sapiens
ggagaaggaarttattttgga

SEQ ID NO: 19220 - DNA, 21 bp, Homo sapiens
ccaagcagacytattcattga

SEQ ID NO: 19221 - DNA, 21 bp, Homo sapiens
gcctgttttakgtgcctcctg

SEQ ID NO: 19222 - DNA, 21 bp, Homo sapiens
agggcagtttkatatacatca

SEQ ID NO: 19223 - DNA, 21 bp, Homo sapiens
aatttgggggrccaagctacc

SEQ ID NO: 19224 - DNA, 21 bp, Homo sapiens
atgtcatttgycattttctgt

SEQ ID NO: 19225 - DNA, 21 bp, Homo sapiens
ccagaggttgrtctcttcaga

SEQ ID NO: 19226 - DNA, 21 bp, Homo sapiens
atatgatcctraattgatttt

SEQ ID NO: 19227 - DNA, 21 bp, Homo sapiens
aaataatcaayaagaataggc

SEQ ID NO: 19228 - DNA, 21 bp, Homo sapiens
ttctcaatgaygcagactctt

SEQ ID NO: 19229 - DNA, 21 bp, Homo sapiens
ggataagcctytactctggca

SEQ ID NO: 19230 - DNA, 21 bp, Homo sapiens
actaacagcaygttagtcagt

SEQ ID NO: 19231 - DNA, 21 bp, Homo sapiens
agctttgtcartgtggttagc

SEQ ID NO: 19232 - DNA, 21 bp, Homo sapiens
acagaaaagcrttagacacaa

SEQ ID NO: 19233 - DNA, 21 bp, Homo sapiens
ggttttgactrgccatgactg

SEQ ID NO: 19234 - DNA, 21 bp, Homo sapiens
tctggctacartcatttctac

SEQ ID NO: 19235 - DNA, 21 bp, Homo sapiens
ggctttgaccmgctacaatca

SEQ ID NO: 19236 - DNA, 21 bp, Homo sapiens
accagccacarctggtttaga

SEQ ID NO: 19237 - DNA, 21 bp, Homo sapiens
atgaatttccrtgcatcttgt

SEQ ID NO: 19238 - DNA, 21 bp, Homo sapiens
cagatctgtgrcaatctgtta

SEQ ID NO: 19239 - DNA, 21 bp, Homo sapiens
actctcctttrtgtacacaat

SEQ ID NO: 19240 - DNA, 21 bp, Homo sapiens
taattgtcaarcaagccagga

SEQ ID NO: 19241 - DNA, 21 bp, Homo sapiens
tttcttagtgytgacatttcc

SEQ ID NO: 19242 - DNA, 21 bp, Homo sapiens
accttgttctrtgggtcaaag

SEQ ID NO: 19243 - DNA, 21 bp, Homo sapiens
accatactctrgtaatgctta

SEQ ID NO: 19244 - DNA, 21 bp, Homo sapiens
gcaggactgtrtgatttgtac

SEQ ID NO: 19245 - DNA, 21 bp, Homo sapiens
tactgccattyctgtgtgcca

SEQ ID NO: 19246 - DNA, 21 bp, Homo sapiens
ttgtgatagayagggagttaa

SEQ ID NO: 19247 - DNA, 21 bp, Homo sapiens
gagaaggagcragggctggga

SEQ ID NO: 19248 - DNA, 21 bp, Homo sapiens
cctgtagataytgctttctca

SEQ ID NO: 19249 - DNA, 21 bp, Homo sapiens
caaatgttagkaaacccatgc

SEQ ID NO: 19250 - DNA, 21 bp, Homo sapiens
tactaagaacmgtgcccaata

SEQ ID NO: 19251 - DNA, 21 bp, Homo sapiens
aagctacttaygttccaaaat

SEQ ID NO: 19252 - DNA, 21 bp, Homo sapiens
aggggacagtrtcattcctta

SEQ ID NO: 19253 - DNA, 21 bp, Homo sapiens
aactgactgcygtcaatctct

SEQ ID NO: 19254 - DNA, 21 bp, Homo sapiens
taatagttctmagaaaggaat

SEQ ID NO: 19255 - DNA, 21 bp, Homo sapiens
gcccaatcagracactgtact

SEQ ID NO: 19256 - DNA, 21 bp, Homo sapiens
caacattgccyaaacatttct

SEQ ID NO: 19257 - DNA, 21 bp, Homo sapiens
aggaagtcagyattgatgatt

SEQ ID NO: 19258 - DNA, 21 bp, Homo sapiens
ggctgtatggygactgcatgt

SEQ ID NO: 19259 - DNA, 21 bp, Homo sapiens
ggaaatgacarctccatttca

SEQ ID NO: 19260 - DNA, 21 bp, Homo sapiens
atttttcattyctctagattc

SEQ ID NO: 19261 - DNA, 21 bp, Homo sapiens
cgaattaaaamctcaatacga

SEQ ID NO: 19262 - DNA, 21 bp, Homo sapiens
gtatttgaackagtattcaat

SEQ ID NO: 19263 - DNA, 21 bp, Homo sapiens
ataccagccaycagaacaaag

SEQ ID NO: 19264 - DNA, 21 bp, Homo sapiens
ctccatctacytttcctagga

SEQ ID NO: 19265 - DNA, 21 bp, Homo sapiens
aaacaggccartaaattcgcc

SEQ ID NO: 19266 - DNA, 21 bp, Homo sapiens
tgggaggtcayctccctcagc

SEQ ID NO: 19267 - DNA, 21 bp, Homo sapiens
caggcctgtgrctggatattc

SEQ ID NO: 19268 - DNA, 21 bp, Homo sapiens
taggaatcccycccacattat

SEQ ID NO: 19269 - DNA, 21 bp, Homo sapiens
gaggaaccatratcaacttta

SEQ ID NO: 19270 - DNA, 21 bp, Homo sapiens
atcctctcttyactccttcaa

SEQ ID NO: 19271 - DNA, 21 bp, Homo sapiens
ttgccaactamaagtttccta

SEQ ID NO: 19272 - DNA, 21 bp, Homo sapiens
tattttggggrctataccctg

SEQ ID NO: 19273 - DNA, 21 bp, Homo sapiens
gttcgttcttygtctccacac

SEQ ID NO: 19274 - DNA, 21 bp, Homo sapiens
tggcatttagrgtctcactag

SEQ ID NO: 19275 - DNA, 21 bp, Homo sapiens
cattttctttyctctattttt

SEQ ID NO: 19276 - DNA, 21 bp, Homo sapiens
catggcattcycatggcctag

SEQ ID NO: 19277 - DNA, 21 bp, Homo sapiens
tgatcagtttraaccttgact

SEQ ID NO: 19278 - DNA, 21 bp, Homo sapiens
cagccccaagrtggatcagga

SEQ ID NO: 19279 - DNA, 21 bp, Homo sapiens
aaaagttatgkatcctatttg

SEQ ID NO: 19280 - DNA, 21 bp, Homo sapiens
tgaaagggacyccttgaaggt

SEQ ID NO: 19281 - DNA, 21 bp, Homo sapiens
aaaggtcccaracaggaaacc

SEQ ID NO: 19282 - DNA, 21 bp, Homo sapiens
gtttcttccartctgtcattt

SEQ ID NO: 19283 - DNA, 21 bp, Homo sapiens
gggcggtcagrgaggtcttat

SEQ ID NO: 19284 - DNA, 21 bp, Homo sapiens
ccttgtgtttkctgctaacag

SEQ ID NO: 19285 - DNA, 21 bp, Homo sapiens
gatacagtgarcaccaactga

SEQ ID NO: 19286 - DNA, 21 bp, Homo sapiens
tcttttaaaaygttagtatct

SEQ ID NO: 19287 - DNA, 21 bp, Homo sapiens
cctttgtaggrtgttgtcctc

SEQ ID NO: 19288 - DNA, 21 bp, Homo sapiens
gccaggaaacyttggccctag

SEQ ID NO: 19289 - DNA, 21 bp, Homo sapiens
tcaaaacctgytggtaaagtc

SEQ ID NO: 19290 - DNA, 21 bp, Homo sapiens
gaagtttataktttggggtcc

SEQ ID NO: 19291 - DNA, 21 bp, Homo sapiens
tcatttgttaytgtaataacc

SEQ ID NO: 19292 - DNA, 21 bp, Homo sapiens
gctaaatttgkcactaaaata

SEQ ID NO: 19293 - DNA, 21 bp, Homo sapiens
cttaaactctytagattcaat

SEQ ID NO: 19294 - DNA, 21 bp, Homo sapiens
aacccagagarttgggtgggg

SEQ ID NO: 19295 - DNA, 21 bp, Homo sapiens
tctcaactaayttcctatgta

SEQ ID NO: 19296 - DNA, 21 bp, Homo sapiens
taatgtaatcrtattgagagc

SEQ ID NO: 19297 - DNA, 21 bp, Homo sapiens
gttacaaaagytggtggcatg

SEQ ID NO: 19298 - DNA, 21 bp, Homo sapiens
atacattccgrtgattaaaaa

SEQ ID NO: 19299 - DNA, 21 bp, Homo sapiens
aattatttctyccatttcctt

SEQ ID NO: 19300 - DNA, 21 bp, Homo sapiens
tattgtgaccrcttcagctgc

SEQ ID NO: 19301 - DNA, 21 bp, Homo sapiens
aaccaaaggcycctcgagaaa

SEQ ID NO: 19302 - DNA, 21 bp, Homo sapiens
gaaacgtagamgtttctctaa

SEQ ID NO: 19303 - DNA, 21 bp, Homo sapiens
tcatattcttmcacatgcaaa

SEQ ID NO: 19304 - DNA, 21 bp, Homo sapiens
agagttgctayattcactcta

SEQ ID NO: 19305 - DNA, 21 bp, Homo sapiens
atgcatggackctccagaatt

SEQ ID NO: 19306 - DNA, 21 bp, Homo sapiens
acctagggctygtaaaactac

SEQ ID NO: 19307 - DNA, 21 bp, Homo sapiens
aatgtccagayccatggcttg

SEQ ID NO: 19308 - DNA, 21 bp, Homo sapiens
taacaaacacyatctaataat

SEQ ID NO: 19309 - DNA, 21 bp, Homo sapiens
ctctacatgcyagctcctctt

SEQ ID NO: 19310 - DNA, 21 bp, Homo sapiens
tttaacaggtrtaattattag

SEQ ID NO: 19311 - DNA, 21 bp, Homo sapiens
ttctttccacytttgttttaa

SEQ ID NO: 19312 - DNA, 21 bp, Homo sapiens
cttttatgtgytcacaaaact

SEQ ID NO: 19313 - DNA, 21 bp, Homo sapiens
attcctgataytgataattcg

SEQ ID NO: 19314 - DNA, 21 bp, Homo sapiens
tttaagacttyagaagacttc

SEQ ID NO: 19315 - DNA, 21 bp, Homo sapiens
aaaaatgttaygaaattttct

SEQ ID NO: 19316 - DNA, 21 bp, Homo sapiens
agtaccattaytgggtatata

SEQ ID NO: 19317 - DNA, 21 bp, Homo sapiens
aggtccctcartcaacagcac

SEQ ID NO: 19318 - DNA, 21 bp, Homo sapiens
tactttgggayatgggaaagg

SEQ ID NO: 19319 - DNA, 21 bp, Homo sapiens
tgctttctgcyttaacaaagg

SEQ ID NO: 19320 - DNA, 21 bp, Homo sapiens
cccattaaggrtatacagaca

SEQ ID NO: 19321 - DNA, 21 bp, Homo sapiens
ccatcctaatyggtgtttgcc

SEQ ID NO: 19322 - DNA, 21 bp, Homo sapiens
tatggacatgycacagtcaat

SEQ ID NO: 19323 - DNA, 21 bp, Homo sapiens
tcaacttcatraagtagttcc

SEQ ID NO: 19324 - DNA, 21 bp, Homo sapiens
cagagagcctycagtgtagag

SEQ ID NO: 19325 - DNA, 21 bp, Homo sapiens
cacagcacaakattctcctct

SEQ ID NO: 19326 - DNA, 21 bp, Homo sapiens
catctgggtgrcacatcgagg

SEQ ID NO: 19327 - DNA, 21 bp, Homo sapiens
ttactttctcmccagaagtgt

SEQ ID NO: 19328 - DNA, 21 bp, Homo sapiens
ttatagccttygggcaatctg

SEQ ID NO: 19329 - DNA, 21 bp, Homo sapiens
ttcagggacayattcacatgc

SEQ ID NO: 19330 - DNA, 21 bp, Homo sapiens
tggagagaaarcgaacatgtc

SEQ ID NO: 19331 - DNA, 21 bp, Homo sapiens
ctagatggtaraaataaatcc

SEQ ID NO: 19332 - DNA, 21 bp, Homo sapiens
acacaagaccragatctgaat

SEQ ID NO: 19333 - DNA, 21 bp, Homo sapiens
gcactgtaagyatcttaattg

SEQ ID NO: 19334 - DNA, 21 bp, Homo sapiens
tatctcaatamagctgttgtt

SEQ ID NO: 19335 - DNA, 21 bp, Homo sapiens
cctgcttaacyctgccaagtt

SEQ ID NO: 19336 - DNA, 21 bp, Homo sapiens
aaaaaccttayaattttttca

SEQ ID NO: 19337 - DNA, 21 bp, Homo sapiens
aaaaatgtgcratgttttcca

SEQ ID NO: 19338 - DNA, 21 bp, Homo sapiens
tggtattggtrgagaaggtag

SEQ ID NO: 19339 - DNA, 21 bp, Homo sapiens
tagatagttcyactttcattg

SEQ ID NO: 19340 - DNA, 21 bp, Homo sapiens
gctcccgcatrtagacataga

SEQ ID NO: 19341 - DNA, 21 bp, Homo sapiens
taaattacatrtggaaaagaa

SEQ ID NO: 19342 - DNA, 21 bp, Homo sapiens
accctttccckaatagtgata

SEQ ID NO: 19343 - DNA, 21 bp, Homo sapiens
cgctttgacaraggtggcatc

SEQ ID NO: 19344 - DNA, 21 bp, Homo sapiens
agggttgaccygctggcatgt

SEQ ID NO: 19345 - DNA, 21 bp, Homo sapiens
ttatgataatmcagtgtagtt

SEQ ID NO: 19346 - DNA, 21 bp, Homo sapiens
caagcaaatgytggagccttg

SEQ ID NO: 19347 - DNA, 21 bp, Homo sapiens
tatatcattgrtatcatatcc

SEQ ID NO: 19348 - DNA, 21 bp, Homo sapiens
ggcaatacttkccatgggctt

SEQ ID NO: 19349 - DNA, 21 bp, Homo sapiens
acaatgcctgycactgagtac

SEQ ID NO: 19350 - DNA, 21 bp, Homo sapiens
ggaaattatcmagggtgacca

SEQ ID NO: 19351 - DNA, 21 bp, Homo sapiens
tgttcttctgrcctgtatgta

SEQ ID NO: 19352 - DNA, 21 bp, Homo sapiens
caaaaactgaytcagaggttg

SEQ ID NO: 19353 - DNA, 21 bp, Homo sapiens
ggcatacagaktggggtaatg

SEQ ID NO: 19354 - DNA, 21 bp, Homo sapiens
tctgaggcacrctcattaatg

SEQ ID NO: 19355 - DNA, 21 bp, Homo sapiens
agtggcatagraaacctattt

SEQ ID NO: 19356 - DNA, 21 bp, Homo sapiens
cgaccagccaytgaaaaggac

SEQ ID NO: 19357 - DNA, 21 bp, Homo sapiens
gctcacatagrtgttatataa

SEQ ID NO: 19358 - DNA, 21 bp, Homo sapiens
aacatttacakattaagttta

SEQ ID NO: 19359 - DNA, 21 bp, Homo sapiens
cattatttcayctgtttttgt

SEQ ID NO: 19360 - DNA, 21 bp, Homo sapiens
cttcattttgrcatcaaatcc

SEQ ID NO: 19361 - DNA, 21 bp, Homo sapiens
cttttgtgtgygccattaatt

SEQ ID NO: 19362 - DNA, 21 bp, Homo sapiens
tgatctgtatratgtaggcac

SEQ ID NO: 19363 - DNA, 21 bp, Homo sapiens
cagtcagtttracatttttga

SEQ ID NO: 19364 - DNA, 21 bp, Homo sapiens
atgtacctcamttttactcac

SEQ ID NO: 19365 - DNA, 21 bp, Homo sapiens
tataatcacaktgtatgatac

SEQ ID NO: 19366 - DNA, 21 bp, Homo sapiens
aaagtgtttcyaccagaaatt

SEQ ID NO: 19367 - DNA, 21 bp, Homo sapiens
gctcttttgaygaggctcttt

SEQ ID NO: 19368 - DNA, 21 bp, Homo sapiens
cttaaaactcycaaacctgca

SEQ ID NO: 19369 - DNA, 21 bp, Homo sapiens
attaagcaatkatttaagagg

SEQ ID NO: 19370 - DNA, 21 bp, Homo sapiens
tctgtcattayggccactacc

SEQ ID NO: 19371 - DNA, 21 bp, Homo sapiens
tgggctgagakagaaaacaaa

SEQ ID NO: 19372 - DNA, 21 bp, Homo sapiens
gtctccttcaygtctccactt

SEQ ID NO: 19373 - DNA, 21 bp, Homo sapiens
tttggaatatmaataccaata

SEQ ID NO: 19374 - DNA, 21 bp, Homo sapiens
agggaagagcraagtgggagg

SEQ ID NO: 19375 - DNA, 21 bp, Homo sapiens
acactgtagamgggagacata

SEQ ID NO: 19376 - DNA, 21 bp, Homo sapiens
ggcccgaggayatgcaaaggt

SEQ ID NO: 19377 - DNA, 21 bp, Homo sapiens
acaattgtccktattataaat

SEQ ID NO: 19378 - DNA, 21 bp, Homo sapiens
tacatgtggartcaataaagc

SEQ ID NO: 19379 - DNA, 21 bp, Homo sapiens
tttacgaaagrttaagagaag

SEQ ID NO: 19380 - DNA, 21 bp, Homo sapiens
ttctattagcrttttagtagg

SEQ ID NO: 19381 - DNA, 21 bp, Homo sapiens
agtccaatttrttggatcagt

SEQ ID NO: 19382 - DNA, 21 bp, Homo sapiens
attttacagakgagaaaactg

SEQ ID NO: 19383 - DNA, 21 bp, Homo sapiens
tgaccaaagayggatgttctc

SEQ ID NO: 19384 - DNA, 21 bp, Homo sapiens
ggcactgctgyagttctcctg

SEQ ID NO: 19385 - DNA, 21 bp, Homo sapiens
tatttatatgyaaaacctaag

SEQ ID NO: 19386 - DNA, 21 bp, Homo sapiens
agatagccacrggacccaagt

SEQ ID NO: 19387 - DNA, 21 bp, Homo sapiens
cacaatgggcmgaggagtgca

SEQ ID NO: 19388 - DNA, 21 bp, Homo sapiens
ttggttgtatmtaagtataca

SEQ ID NO: 19389 - DNA, 21 bp, Homo sapiens
aaaagctttgycatcaaattg

SEQ ID NO: 19390 - DNA, 21 bp, Homo sapiens
ttgtagatatrgaccattgtg

SEQ ID NO: 19391 - DNA, 21 bp, Homo sapiens
atgctgttgtraactttcatg

SEQ ID NO: 19392 - DNA, 21 bp, Homo sapiens
actattctctraatttgaagt

SEQ ID NO: 19393 - DNA, 21 bp, Homo sapiens
gtattccattktctggatatg

SEQ ID NO: 19394 - DNA, 21 bp, Homo sapiens
caaggtacccrcaaaaattcc

SEQ ID NO: 19395 - DNA, 21 bp, Homo sapiens
aacagaaaagrggatggagct

SEQ ID NO: 19396 - DNA, 21 bp, Homo sapiens
ggtgtcctttygggagggtga

SEQ ID NO: 19397 - DNA, 21 bp, Homo sapiens
gaagcaggtaygtcaaatcaa

SEQ ID NO: 19398 - DNA, 21 bp, Homo sapiens
gcgatgagggraagggggaag

SEQ ID NO: 19399 - DNA, 21 bp, Homo sapiens
acataggttayagaaagtagg

SEQ ID NO: 19400 - DNA, 21 bp, Homo sapiens
aattgttgtgragaagactga

SEQ ID NO: 19401 - DNA, 21 bp, Homo sapiens
accttgtcagygtcagtactt

SEQ ID NO: 19402 - DNA, 21 bp, Homo sapiens
gtgggaatacrgattggaaca

SEQ ID NO: 19403 - DNA, 21 bp, Homo sapiens
ctcccagcaargcctgtgcct

SEQ ID NO: 19404 - DNA, 21 bp, Homo sapiens
gtgccaagcaytgtgcttagt

SEQ ID NO: 19405 - DNA, 21 bp, Homo sapiens
atagcatcccyatcttaaaac

SEQ ID NO: 19406 - DNA, 21 bp, Homo sapiens
cttttaatcamattgatgagg

SEQ ID NO: 19407 - DNA, 21 bp, Homo sapiens
cattggtaagrctgttaacgt

SEQ ID NO: 19408 - DNA, 21 bp, Homo sapiens
cttttcatcarctcagtgtgt

SEQ ID NO: 19409 - DNA, 21 bp, Homo sapiens
aaaatgggaarttagttttta

SEQ ID NO: 19410 - DNA, 21 bp, Homo sapiens
aaaggattagrgtggtaaatt

SEQ ID NO: 19411 - DNA, 21 bp, Homo sapiens
tgtagactaarctataatacc

SEQ ID NO: 19412 - DNA, 21 bp, Homo sapiens
cctatgcaaayctgttctttg

SEQ ID NO: 19413 - DNA, 21 bp, Homo sapiens
agatttaggcracttgggttc

SEQ ID NO: 19414 - DNA, 21 bp, Homo sapiens
ctatattgtarcccaactgaa

SEQ ID NO: 19415 - DNA, 21 bp, Homo sapiens
tagtgtgaatrttcatatatt

SEQ ID NO: 19416 - DNA, 21 bp, Homo sapiens
atggtaaatgyccattattag

SEQ ID NO: 19417 - DNA, 21 bp, Homo sapiens
ggtgggggaarcatttcacag

SEQ ID NO: 19418 - DNA, 21 bp, Homo sapiens
aggcatacaarggtaaattta

SEQ ID NO: 19419 - DNA, 21 bp, Homo sapiens
tttcctatttygcagttgaga

SEQ ID NO: 19420 - DNA, 21 bp, Homo sapiens
ggggaagataygatcaaagga

SEQ ID NO: 19421 - DNA, 21 bp, Homo sapiens
ttaactatttkatgggggtaa

SEQ ID NO: 19422 - DNA, 21 bp, Homo sapiens
gccgtgtccaygcagcaactc

SEQ ID NO: 19423 - DNA, 21 bp, Homo sapiens
agaaattgatyatttaatggg

SEQ ID NO: 19424 - DNA, 21 bp, Homo sapiens
atgttttactyatatttttta

SEQ ID NO: 19425 - DNA, 21 bp, Homo sapiens
tattatactgkagccctgttg

SEQ ID NO: 19426 - DNA, 21 bp, Homo sapiens
tacaatatggycttctattac

SEQ ID NO: 19427 - DNA, 21 bp, Homo sapiens
aatcttttgcycatttttcta

SEQ ID NO: 19428 - DNA, 21 bp, Homo sapiens
aacaaggtggyaaataaaaaa

SEQ ID NO: 19429 - DNA, 21 bp, Homo sapiens
tgagtgaaacyatgaataaaa

SEQ ID NO: 19430 - DNA, 21 bp, Homo sapiens
gaataaaatakgcatgtgtgt

SEQ ID NO: 19431 - DNA, 21 bp, Homo sapiens
agttgaattartgtaggtaaa

SEQ ID NO: 19432 - DNA, 21 bp, Homo sapiens
tgttcagtttytcagtatctt

SEQ ID NO: 19433 - DNA, 21 bp, Homo sapiens
cctgggaagaratgaggctat

SEQ ID NO: 19434 - DNA, 21 bp, Homo sapiens
caagatgtagmttgagattcc

SEQ ID NO: 19435 - DNA, 21 bp, Homo sapiens
ggtaggctgaraaagtgactt

SEQ ID NO: 19436 - DNA, 21 bp, Homo sapiens
ggcaatggaartttggatttt

SEQ ID NO: 19437 - DNA, 21 bp, Homo sapiens
taaaacagacrtgagagagct

SEQ ID NO: 19438 - DNA, 21 bp, Homo sapiens
gtaacgccagmgacgtctgga

SEQ ID NO: 19439 - DNA, 21 bp, Homo sapiens
ttgaaatataraagtgtgagt

SEQ ID NO: 19440 - DNA, 21 bp, Homo sapiens
cagaagcagcrgaagcacctg

SEQ ID NO: 19441 - DNA, 21 bp, Homo sapiens
tggcgaggaaytggggagcag

SEQ ID NO: 19442 - DNA, 21 bp, Homo sapiens
atatgcagagycccaaggcca

SEQ ID NO: 19443 - DNA, 21 bp, Homo sapiens
cagcagaagcygttttatcgt

SEQ ID NO: 19444 - DNA, 21 bp, Homo sapiens
aaagccagggrgatctggcaa

SEQ ID NO: 19445 - DNA, 21 bp, Homo sapiens
caatttactgkcgtgcgttcc

SEQ ID NO: 19446 - DNA, 21 bp, Homo sapiens
atgtggcccayggtcagcaac

SEQ ID NO: 19447 - DNA, 21 bp, Homo sapiens
gcctacttatytatatgttag

SEQ ID NO: 19448 - DNA, 21 bp, Homo sapiens
taaggcaggcktcatcatccg

SEQ ID NO: 19449 - DNA, 21 bp, Homo sapiens
gctgtgtccckagaaagtagc

SEQ ID NO: 19450 - DNA, 21 bp, Homo sapiens
gcccttagtcrctgtccactc

SEQ ID NO: 19451 - DNA, 21 bp, Homo sapiens
aaaataagatragttccatgc

SEQ ID NO: 19452 - DNA, 21 bp, Homo sapiens
gggccagggcygctactgcaa

SEQ ID NO: 19453 - DNA, 21 bp, Homo sapiens
tctaactggaragggcgtgcc

SEQ ID NO: 19454 - DNA, 21 bp, Homo sapiens
cttgggtctayaaatctgtgt

SEQ ID NO: 19455 - DNA, 21 bp, Homo sapiens
ttgactggcaycctgaagttt

SEQ ID NO: 19456 - DNA, 21 bp, Homo sapiens
aaaagggcgcrgtgaaagagg

SEQ ID NO: 19457 - DNA, 21 bp, Homo sapiens
gctagatcacyacggcttaag

SEQ ID NO: 19458 - DNA, 21 bp, Homo sapiens
tatgacagacyccggtaaaga

SEQ ID NO: 19459 - DNA, 21 bp, Homo sapiens
ttcttgtggtytggcttctgt

SEQ ID NO: 19460 - DNA, 21 bp, Homo sapiens
ggttatctgaycttgaatgtg

SEQ ID NO: 19461 - DNA, 21 bp, Homo sapiens
cctgactccgrccaggtcatg

SEQ ID NO: 19462 - DNA, 21 bp, Homo sapiens
ccaagtactgrccagcgcagt

SEQ ID NO: 19463 - DNA, 21 bp, Homo sapiens
cgattccgaayaacttgattg

SEQ ID NO: 19464 - DNA, 21 bp, Homo sapiens
tgcattttgtrgtttttgcta

SEQ ID NO: 19465 - DNA, 21 bp, Homo sapiens
ttgcatctgtragtaaacaaa

SEQ ID NO: 19466 - DNA, 21 bp, Homo sapiens
ctattaactcrcttcactcac

SEQ ID NO: 19467 - DNA, 21 bp, Homo sapiens
gtagtatcttrtcacttgcat

SEQ ID NO: 19468 - DNA, 21 bp, Homo sapiens
acattgggccyatctgtatag

SEQ ID NO: 19469 - DNA, 21 bp, Homo sapiens
caaagaaaacyacgtcaaagc

SEQ ID NO: 19470 - DNA, 21 bp, Homo sapiens
ggcttaatcaygagccacaca

SEQ ID NO: 19471 - DNA, 21 bp, Homo sapiens
agtcctctggmctctttgttc

SEQ ID NO: 19472 - DNA, 21 bp, Homo sapiens
aaggaatgctrtcaatcagac

SEQ ID NO: 19473 - DNA, 21 bp, Homo sapiens
acctaattatrtaaacaatct

SEQ ID NO: 19474 - DNA, 21 bp, Homo sapiens
aacacctgggrctatcggaac

SEQ ID NO: 19475 - DNA, 21 bp, Homo sapiens
ctaccttcctycccaaactgt

SEQ ID NO: 19476 - DNA, 21 bp, Homo sapiens
attaagctgayagagattggc

SEQ ID NO: 19477 - DNA, 21 bp, Homo sapiens
ggagttggctmatcccactca

SEQ ID NO: 19478 - DNA, 21 bp, Homo sapiens
tacaaccagayacacccataa

SEQ ID NO: 19479 - DNA, 21 bp, Homo sapiens
tcagagtctaytctctatgtg

SEQ ID NO: 19480 - DNA, 21 bp, Artificial Sequence
  primer sequence
tgtgcttacaaacccatcatc

SEQ ID NO: 19481 - DNA, 22 bp, Artificial Sequence
  primer sequence
cccaaagacttggtagtactcg

SEQ ID NO: 19482 - DNA, 19 bp, Artificial Sequence
  primer sequence
tgaagacaagacgatctcc

SEQ ID NO: 19483 - DNA, 18 bp, Artificial Sequence
  primer sequence
atgtggaacataatctgg

SEQ ID NO: 19484 - DNA, 18 bp, Artificial Sequence
  primer sequence
ggacctcttcatttccac

SEQ ID NO: 19485 - DNA, 18 bp, Artificial Sequence
  primer sequence
gatgatgtcgctgtattc

SEQ ID NO: 19486 - DNA, 18 bp, Artificial Sequence
  primer sequence
ctccttcccgaggccaag

SEQ ID NO: 19487 - DNA, 18 bp, Artificial Sequence
  primer sequence
tggctgctccagaccatt

SEQ ID NO: 19488 - DNA, 18 bp, Artificial Sequence
  primer sequence
ggcagctggagtctttcc

SEQ ID NO: 19489 - DNA, 18 bp, Artificial Sequence
  primer sequence
aaaggatgcaacccatcg

SEQ ID NO: 19490 - DNA, 19 bp, Artificial Sequence
  primer sequence
attctttccgttggcatcc

SEQ ID NO: 19491 - DNA, 18 bp, Artificial Sequence
  primer sequence
gggtgacacgaggggact

SEQ ID NO: 19492 - DNA, 18 bp, Artificial Sequence
  primer sequence
tcttgaaccacaggaatg

SEQ ID NO: 19493 - DNA, 18 bp, Artificial Sequence
  primer sequence
tcttacacacacacaccc

SEQ ID NO: 19494 - DNA, 21 bp, Artificial Sequence
  primer sequence
gggagagatttgaacaagcag

SEQ ID NO: 19495 - DNA, 18 bp, Artificial Sequence
  primer sequence
aacgaacaaactcacagc

SEQ ID NO: 19496 - DNA, 18 bp, Artificial Sequence
  primer sequence
aggtctattttcacaagc

SEQ ID NO: 19497 - DNA, 22 bp, Artificial Sequence
  primer sequence
ctggtgcccaggttaatcctac

SEQ ID NO: 19498 - DNA, 18 bp, Artificial Sequence
  primer sequence
cagtgcttttataattcg

SEQ ID NO: 19499 - DNA, 21 bp, Artificial Sequence
  primer sequence
cccttatagatggcaaagttc

SEQ ID NO: 19500 - DNA, 24 bp, Artificial Sequence
  primer sequence
gacatcttctcgaataattaaagg

SEQ ID NO: 19501 - DNA, 18 bp, Artificial Sequence
  primer sequence
atataccatgatgggttc

SEQ ID NO: 19502 - DNA, 20 bp, Artificial Sequence
  primer sequence
actacagcgcctacagctac

SEQ ID NO: 19503 - DNA, 18 bp, Artificial Sequence
  primer sequence
aggggcctaggggttgtg

SEQ ID NO: 19504 - DNA, 18 bp, Artificial Sequence
  primer sequence
tggtcaccatttgcgact

SEQ ID NO: 19505 - DNA, 18 bp, Artificial Sequence
  primer sequence
aggtggccatgaaaccaa

SEQ ID NO: 19506 - DNA, 21 bp, Artificial Sequence
  primer sequence
ctgtgtgtaggagggatttcg

SEQ ID NO: 19507 - DNA, 18 bp, Artificial Sequence
  primer sequence
agataatgccaaacgagc

SEQ ID NO: 19508 - DNA, 24 bp, Artificial Sequence
  primer sequence
aatggaagtttgtgaagtatgtgg

SEQ ID NO: 19509 - DNA, 18 bp, Artificial Sequence
  primer sequence
cgattcagtgtttgtgtc

SEQ ID NO: 19510 - DNA, 18 bp, Artificial Sequence
  primer sequence
tctcccagtttgccttcg

SEQ ID NO: 19511 - DNA, 18 bp, Artificial Sequence
  primer sequence
gcaatagtaagacattcg

SEQ ID NO: 19512 - DNA, 22 bp, Artificial Sequence
  primer sequence
tgtggaaatacgtccagtacca

SEQ ID NO: 19513 - DNA, 21 bp, Artificial Sequence
  primer sequence
gaactggtcagagttcaggtc

SEQ ID NO: 19514 - DNA, 20 bp, Artificial Sequence
  primer sequence
cctgcagaagtcaagggatg

SEQ ID NO: 19515 - DNA, 22 bp, Artificial Sequence
  primer sequence
ttttcatttaggcctggaaatc

SEQ ID NO: 19516 - DNA, 21 bp, Artificial Sequence
  primer sequence
agaccctgcagttagcagttg

SEQ ID NO: 19517 - DNA, 19 bp, Artificial Sequence
  primer sequence
acttgggctacttccagtg

SEQ ID NO: 19518 - DNA, 20 bp, Artificial Sequence
  primer sequence
agcaggagtacgtggtggtc

SEQ ID NO: 19519 - DNA, 21 bp, Artificial Sequence
  primer sequence
tcgagtccatttatcatccac

SEQ ID NO: 19520 - DNA, 22 bp, Artificial Sequence
  primer sequence
atattgtgaccatggactggtg

SEQ ID NO: 19521 - DNA, 20 bp, Artificial Sequence
  primer sequence
cacaataattggatgcgaag

SEQ ID NO: 19522 - DNA, 19 bp, Artificial Sequence
  primer sequence
ctgggatggaatgatgctg

SEQ ID NO: 19523 - DNA, 18 bp, Artificial Sequence
  primer sequence
tgatgctaatccatacag

SEQ ID NO: 19524 - DNA, 18 bp, Artificial Sequence
  primer sequence
gacgaacacccggacctc

SEQ ID NO: 19525 - DNA, 18 bp, Artificial Sequence
  primer sequence
cctcaaaggcgatgagca

SEQ ID NO: 19526 - DNA, 18 bp, Artificial Sequence
  primer sequence
gtcgtctccgccttcaac

SEQ ID NO: 19527 - DNA, 18 bp, Artificial Sequence
  primer sequence
catgcgccgctggtcttc

SEQ ID NO: 19528 - DNA, 18 bp, Artificial Sequence
  primer sequence
gccgaaatcgagctgtgg

SEQ ID NO: 19529 - DNA, 18 bp, Artificial Sequence
  primer sequence
cgcactgcgtggtacttg

SEQ ID NO: 19530 - DNA, 19 bp, Artificial Sequence
  primer sequence
aagtccgcccagacgcttg

SEQ ID NO: 19531 - DNA, 18 bp, Artificial Sequence
  primer sequence
tacttcgccgccgagtgc

SEQ ID NO: 19532 - DNA, 25 bp, Artificial Sequence
  primer sequence
ggagttcatcccttcttatcagttc

SEQ ID NO: 19533 - DNA, 18 bp, Artificial Sequence
  primer sequence
tgcccatccttctttccc

SEQ ID NO: 19534 - DNA, 19 bp, Artificial Sequence
  primer sequence
cccatggagagtgtgatgg

SEQ ID NO: 19535 - DNA, 23 bp, Artificial Sequence
  primer sequence
attcccattttgttgacaaggag

SEQ ID NO: 19536 - DNA, 21 bp, Artificial Sequence
  primer sequence
tcgctactcatcaactcctcc

SEQ ID NO: 19537 - DNA, 18 bp, Artificial Sequence
  primer sequence
ccacttcgctcctcctcc

SEQ ID NO: 19538 - DNA, 18 bp, Artificial Sequence
  primer sequence
ccgggacaactcctcagc

SEQ ID NO: 19539 - DNA, 18 bp, Artificial Sequence
  primer sequence
gttgaccgaggcatccac

SEQ ID NO: 19540 - DNA, 19 bp, Artificial Sequence
  primer sequence
aggatggagggtgaactgg

SEQ ID NO: 19541 - DNA, 18 bp, Artificial Sequence
  primer sequence
gacctgcggtggtgtacg

SEQ ID NO: 19542 - DNA, 20 bp, Artificial Sequence
  primer sequence
gtgcgagcagtgacaccatc

SEQ ID NO: 19543 - DNA, 18 bp, Artificial Sequence
  primer sequence
tgtagagccaagacgtag

SEQ ID NO: 19544 - DNA, 18 bp, Artificial Sequence
  primer sequence
atgcggccgaatgtcaaa

SEQ ID NO: 19545 - DNA, 18 bp, Artificial Sequence
  primer sequence
tgtcactgccgattcttc

SEQ ID NO: 19546 - DNA, 18 bp, Artificial Sequence
  primer sequence
cggtggatgggagtgaag

SEQ ID NO: 19547 - DNA, 18 bp, Artificial Sequence
  primer sequence
ttttgggtctcgtttctg

SEQ ID NO: 19548 - DNA, 23 bp, Artificial Sequence
  primer sequence
ataactgggtacgtggagttctg

SEQ ID NO: 19549 - DNA, 18 bp, Artificial Sequence
  primer sequence
tacgctgccagtgacgac

SEQ ID NO: 19550 - DNA, 18 bp, Artificial Sequence
  primer sequence
ttcgaccacagcggcaag

SEQ ID NO: 19551 - DNA, 22 bp, Artificial Sequence
  primer sequence
ggctactgaagaaacattgtgg

SEQ ID NO: 19552 - DNA, 18 bp, Artificial Sequence
  primer sequence
ctcaagtgccctgtatgg

SEQ ID NO: 19553 - DNA, 20 bp, Artificial Sequence
  primer sequence
aagatggacccatttcagtc

SEQ ID NO: 19554 - DNA, 19 bp, Artificial Sequence
  primer sequence
atcatatgcgattacattc

SEQ ID NO: 19555 - DNA, 19 bp, Artificial Sequence
  primer sequence
ggtcctgtccttgcagtgg

SEQ ID NO: 19556 - DNA, 18 bp, Artificial Sequence
  primer sequence
cttgggctcaccattttc

SEQ ID NO: 19557 - DNA, 18 bp, Artificial Sequence
  primer sequence
cctggccctgagagcttg

SEQ ID NO: 19558 - DNA, 18 bp, Artificial Sequence
  primer sequence
aaaccaagtgatttctgg

SEQ ID NO: 19559 - DNA, 20 bp, Artificial Sequence
  primer sequence
caagacctaaaattgtctgg

SEQ ID NO: 19560 - DNA, 18 bp, Artificial Sequence
  primer sequence
tccctgcttgtctcgccg

SEQ ID NO: 19561 - DNA, 19 bp, Artificial Sequence
  primer sequence
gctgatgctggagtgatgg

SEQ ID NO: 19562 - DNA, 20 bp, Artificial Sequence
  primer sequence
tcagatgttaaatgaaccag

SEQ ID NO: 19563 - DNA, 20 bp, Artificial Sequence
  primer sequence
ttgtatcacaagtccttcag

SEQ ID NO: 19564 - DNA, 19 bp, Artificial Sequence
  primer sequence
ccccctcaagcagctagta

SEQ ID NO: 19565 - DNA, 21 bp, Artificial Sequence
  primer sequence
ccgtaaaaattcaaggggatg

SEQ ID NO: 19566 - DNA, 18 bp, Artificial Sequence
  primer sequence
ttttgattgagagggaag

SEQ ID NO: 19567 - DNA, 18 bp, Artificial Sequence
  primer sequence
acaaatgtaatcctgcac

SEQ ID NO: 19568 - DNA, 18 bp, Artificial Sequence
  primer sequence
actgcacattgattgagg

SEQ ID NO: 19569 - DNA, 18 bp, Artificial Sequence
  primer sequence
taagaaaccgcaagtctg

SEQ ID NO: 19570 - DNA, 20 bp, Artificial Sequence
  primer sequence
ttgggatgtacttgacagac

SEQ ID NO: 19571 - DNA, 21 bp, Artificial Sequence
  primer sequence
atcttcaagcagggagtcgag

SEQ ID NO: 19572 - DNA, 18 bp, Artificial Sequence
  primer sequence
gaaggccgaatgctttga

SEQ ID NO: 19573 - DNA, 18 bp, Artificial Sequence
  primer sequence
catccacccctgcccaag

SEQ ID NO: 19574 - DNA, 20 bp, Artificial Sequence
  primer sequence
ggcgattattggtgttttgg

SEQ ID NO: 19575 - DNA, 18 bp, Artificial Sequence
  primer sequence
gtcgggggcagcgacttg

SEQ ID NO: 19576 - DNA, 20 bp, Artificial Sequence
  primer sequence
agtttttaaccgatcctttc

SEQ ID NO: 19577 - DNA, 21 bp, Artificial Sequence
  primer sequence
atcaccggctggaacttaatc

SEQ ID NO: 19578 - DNA, 23 bp, Artificial Sequence
  primer sequence
gttggagacactttgtagcagag

SEQ ID NO: 19579 - DNA, 18 bp, Artificial Sequence
  primer sequence
cgcagattcaggtgtggc

SEQ ID NO: 19580 - DNA, 20 bp, Artificial Sequence
  primer sequence
cattaaatcggatccttctc

SEQ ID NO: 19581 - DNA, 18 bp, Artificial Sequence
  primer sequence
tatcaaaggttccctgag

SEQ ID NO: 19582 - DNA, 18 bp, Artificial Sequence
  primer sequence
ggattcattggtttggac

SEQ ID NO: 19583 - DNA, 22 bp, Artificial Sequence
  primer sequence
gatacagatgtctgtgggttgc

SEQ ID NO: 19584 - DNA, 18 bp, Artificial Sequence
  primer sequence
tagaatgctcacacttcc

SEQ ID NO: 19585 - DNA, 20 bp, Artificial Sequence
  primer sequence
tggagaaactagtcaaaagg

SEQ ID NO: 19586 - DNA, 23 bp, Artificial Sequence
  primer sequence
atccttctgacaccacaagtatc

SEQ ID NO: 19587 - DNA, 19 bp, Artificial Sequence
  primer sequence
gtgaagctcgctgctttcc

SEQ ID NO: 19588 - DNA, 19 bp, Artificial Sequence
  primer sequence
actcgtccaggcccatttg

SEQ ID NO: 19589 - DNA, 18 bp, Artificial Sequence
  primer sequence
agcctgggcatggtctac

SEQ ID NO: 19590 - DNA, 18 bp, Artificial Sequence
  primer sequence
gccacagtcgctcaggtt

SEQ ID NO: 19591 - DNA, 20 bp, Artificial Sequence
  primer sequence
gtcttcgggaaggagctcaa

SEQ ID NO: 19592 - DNA, 16 bp, Artificial Sequence
  primer sequence
ggctccccagctcttc

SEQ ID NO: 19593 - DNA, 20 bp, Artificial Sequence
  primer sequence
aaagaagtgccccaggtctc

SEQ ID NO: 19594 - DNA, 18 bp, Artificial Sequence
  primer sequence
cccgtaatcctccccaat

SEQ ID NO: 19595 - DNA, 16 bp, Artificial Sequence
  primer sequence
tgtgcgggacacacag

SEQ ID NO: 19596 - DNA, 17 bp, Artificial Sequence
  primer sequence
tgcacaaggaaatgtga

SEQ ID NO: 19597 - DNA, 16 bp, Artificial Sequence
  primer sequence
tccaggtttcgggtgt

SEQ ID NO: 19598 - DNA, 17 bp, Artificial Sequence
  primer sequence
acttcggggacgccaat

SEQ ID NO: 19599 - DNA, 21 bp, Artificial Sequence
  primer sequence
aaatcgagaggactttattgc

SEQ ID NO: 19600 - DNA, 19 bp, Artificial Sequence
  primer sequence
gggtggctgggtcctcctg

SEQ ID NO: 19601 - DNA, 18 bp, Artificial Sequence
  primer sequence
agagcagatggcgaaggg

SEQ ID NO: 19602 - DNA, 16 bp, Artificial Sequence
  primer sequence
acgcggccgtctggtt

SEQ ID NO: 19603 - DNA, 20 bp, Artificial Sequence
  primer sequence
aggtccctgtcaagtgcctc

SEQ ID NO: 19604 - DNA, 20 bp, Artificial Sequence
  primer sequence
acacccaggaatgaacaagg

SEQ ID NO: 19605 - DNA, 30 bp, Artificial Sequence
  primer sequence
gtcaattcttctacggagttttaacctaca

SEQ ID NO: 19606 - DNA, 24 bp, Artificial Sequence
  primer sequence
aactggtttcacaccgaaggacta

SEQ ID NO: 19607 - DNA, 25 bp, Artificial Sequence
  primer sequence
gacccgcttcgttttccctctaatc

SEQ ID NO: 19608 - DNA, 29 bp, Artificial Sequence
  primer sequence
tgggaggatataattgctgtttctatgac

SEQ ID NO: 19609 - DNA, 24 bp, Artificial Sequence
  primer sequence
ccgttaagcagaaagacctggagt

SEQ ID NO: 19610 - DNA, 25 bp, Artificial Sequence
  primer sequence
ttcagcaaaagtaatggattgttcc

SEQ ID NO: 19611 - DNA, 861 bp, Artificial Sequence
  Probe sequence
aaagagtggctgttattggcggtggtttggttggagcactgaatgcctgctttcttgcaaagaggaattttcaagttgatgtgtacgaagctagggaagatattcgcgtggctaaatctgcacgtggaaggagcattaacttggccctttcttatagaggacggcaggccttgaaagccattggtctggaagatcagatcgtttccaaaggtgtgcccatgaaagccagaatgatccactctctttcgggaaagaagtctgcaattccctatgggaacaagtcacagtatatcctttcaataagcagagaaaacttaaacaaggacctgctgactgccgtggagtcctatgccaatgcgaaggtgcactttggccacaagctgtcgaaatgcattccggaggaaggggtactcacagtgctcggacctgacaaggttccccgagatgtcacatgtgaccttgttgtagggtgtgatggagcctattcaactgtcagagcccacctcatgaagaagccccgctttgattacactcagcaatatatccctcatggatacatggagttgacaattccacctaagaatggggagtacgccatggaacctaactgtcttcacatttggcctagaaatgcctatatgatgatcgcccttccaaacatggacaaatctttcacatgcaccttgttcatgccctttgaggagtttgaaagacttccaacgcgcagcgatgtgctggacttcttccagaagaactttccagatgctatccctctgatgggagagcaagccctcatgagagatttctttctgttgcctgcccagcccatgatatcagtgaagtgctctcccttccacctga

SEQ ID NO: 19612 - DNA, 861 bp, Artificial Sequence
  Probe sequence
tcaggtggaagggagagcacttcactgatatcatgggctgggcaggcaacagaaagaaatctctcatgagggcttgctctcccatcagagggatagcatctggaaagttcttctggaagaagtccagcacatcgctgcgcgttggaagtctttcaaactcctcaaagggcatgaacaaggtgcatgtgaaagatttgtccatgtttggaagggcgatcatcatataggcatttctaggccaaatgtgaagacagttaggttccatggcgtactccccattcttaggtggaattgtcaactccatgtatccatgagggatatattgctgagtgtaatcaaagcggggcttcttcatgaggtgggctctgacagttgaataggctccatcacaccctacaacaaggtcacatgtgacatctcggggaaccttgtcaggtccgagcactgtgagtaccccttcctccggaatgcatttcgacagcttgtggccaaagtgcaccttcgcattggcataggactccacggcagtcagcaggtccttgtttaagttttctctgcttattgaaaggatatactgtgacttgttcccatagggaattgcagacttctttcccgaaagagagtggatcattctggctttcatgggcacacctttggaaacgatctgatcttccagaccaatggctttcaaggcctgccgtcctctataagaaagggccaagttaatgctccttccacgtgcagatttagccacgcgaatatcttccctagcttcgtacacatcaacttgaaaattcctctttgcaagaaagcaggcattcagtgctccaaccaaaccaccgccaataacagccactcttt

SEQ ID NO: 19613 - DNA, 461 bp, Artificial Sequence
  Probe sequence
gccagaacctgctcatcctcgagaaggccagaagctgttgttacattgtgaggggcgtggcaatccagtcccccagcagtacgtgtgggtaaaggaaggcagtgagccacccctcaagatgacccaagagagtgctctcatcttcccctttttgaataagagtgacagtggcacttatggctgtacagccacaagcaacatgggcagctatacagcctacttcaccctcaatgtcaacgaccccagtccagtgccctcgtcctccagtacctaccacgccatcattggagggattgtggctttcattgtcttcctgctgctcattctgctcattttccttggacactatttgatccggcacaaaggaacctacctgacacacgaagcgaagggttccgacgatgctccagatgcggatacggccatcatcaacgcagaaggcgggcagtcaggcggggatg

SEQ ID NO: 19614 - DNA, 461 bp, Artificial Sequence
  Probe sequence
catccccgcctgactgcccgccttctgcgttgatgatggccgtatccgcatctggagcatcgtcggaacccttcgcttcgtgtgtcaggtaggttcctttgtgccggatcaaatagtgtccaaggaaaatgagcagaatgagcagcaggaagacaatgaaagccacaatccctccaatgatggcgtggtaggtactggaggacgagggcactggactggggtcgttgacattgagggtgaagtaggctgtatagctgcccatgttgcttgtggctgtacagccataagtgccactgtcactcttattcaaaaaggggaagatgagagcactctcttgggtcatcttgaggggtggctcactgccttcctttacccacacgtactgctgggggactggattgccacgcccctcacaatgtaacaacagcttctggccttctcgaggatgagcaggttctggc

SEQ ID NO: 19615 - DNA, 1334 bp, Artificial Sequence
  Probe sequence
gtcccttcacaccacccaaccgacccagtagaactgaggcgccttaactttcaaacaccaggtatggctagccatcctccaatacctatcttggaacttgcagatcatattgagaggttgaaagcaaatgataacctgaagttttcccaggaatatgagtcaattgaccctggccagcagttcacatgggaacactcaaacttggaagtaaacaaaccaaagaacagatatgcaaatgtcattgcatacgatcactcccgggttctcttatcagcaatagaaggaatcccaggaagtgactatgtgaatgccaactacatagatggctataggaaacaaaatgcctatattgcaacccagggatctcttcctgaaacatttggggacttttggagaatgatatgggagcaacgaagtgccacagttgtcatgatgacaaagctagaagaaaggtcgagggtgaagtgtgaccagtattggcccagcagaggcacagaaactcacgggctggtccaggtgacgctgctggatactgtggagcttgccacatactgtgtccggacatttgcactttataagaatggatcgagtgagaagagggaagtgagacaattccagttcaccgcctggcctgatcatggtgttccagagcaccccacacctttcctagctttcttacggagagtcaaaacctgcaatcctccagatgcagggccaatggtggtacactgcagtgctggtgttggcagaactggctgcttcattgtaatagatgccatgttagaaagaataaagcatgaaaaaactgtagatatttatggccatgtaactttaatgagagcccagaggaattacatggtacaaacagaagaccagtacatctttatccatgatgcactgttagaagcagtgacatgtggaaataccgaagtgccggctagaaacttgtatgcctacattcagaagctgacacaaatagaaacaggggagaatgtcaccggaatggagctcgaatttaagcgtctagccagctcaaaagctcacacctcaagattcatcagtgccaatcttccatgtaataaattcaaaaaccgccttgttaatattatgccatatgaatccacaagggtgtgcctgcagcctatccgaggagttgaaggctctgattacatcaatgccagtttccttgatggatatagacaacagaaagcctacattgctacccaggggcccttagcagagacaactgaagacttttggcgcatgctttgggaacacaattccaccatcgttgtgatgctcaccaagctgagagaaatgggcagagagaaatg

SEQ ID NO: 19616 - DNA, 1334 bp, Artificial Sequence
  Probe sequence
catttctctctgcccatttctctcagcttggtgagcatcacaacgatggtggaattgtgttcccaaagcatgcgccaaaagtcttcagttgtctctgctaagggcccctgggtagcaatgtaggctttctgttgtctatatccatcaaggaaactggcattgatgtaatcagagccttcaactcctcggataggctgcaggcacacccttgtggattcatatggcataatattaacaaggcggtttttgaatttattacatggaagattggcactgatgaatcttgaggtgtgagcttttgagctggctagacgcttaaattcgagctccattccggtgacattctcccctgtttctatttgtgtcagcttctgaatgtaggcatacaagtttctagccggcacttcggtatttccacatgtcactgcttctaacagtgcatcatggataaagatgtactggtcttctgtttgtaccatgtaattcctctgggctctcattaaagttacatggccataaatatctacagttttttcatgctttattctttctaacatggcatctattacaatgaagcagccagttctgccaacaccagcactgcagtgtaccaccattggccctgcatctggaggattgcaggttttgactctccgtaagaaagctaggaaaggtgtggggtgctctggaacaccatgatcaggccaggcggtgaactggaattgtctcacttccctcttctcactcgatccattcttataaagtgcaaatgtccggacacagtatgtggcaagctccacagtatccagcagcgtcacctggaccagcccgtgagtttctgtgcctctgctgggccaatactggtcacacttcaccctcgacctttcttctagctttgtcatcatgacaactgtggcacttcgttgctcccatatcattctccaaaagtccccaaatgtttcaggaagagatccctgggttgcaatataggcattttgtttcctatagccatctatgtagttggcattcacatagtcacttcctgggattccttctattgctgataagagaacccgggagtgatcgtatgcaatgacatttgcatatctgttctttggtttgtttacttccaagtttgagtgttcccatgtgaactgctggccagggtcaattgactcatattcctgggaaaacttcaggttatcatttgctttcaacctctcaatatgatctgcaagttccaagataggtattggaggatggctagccatacctggtgtttgaaagttaaggcgcctcagttctactgggtcggttgggtggtgtgaagggac

SEQ ID NO: 19617 - DNA, 979 bp, Artificial Sequence
  Probe sequence
gctggacactttgcgagggcttctgctggctgctgctgctgcccgtgacgctgcttatcatagcccgcccggtaaaactcgctgctttccctacctccttaagtgactgccaaacgcccaccggctggaactgctccggttacgatgacagagaaaatgatctcttcctgtgtgacaccaacacctgtaaatttgacggggaatgtttaaggattggagacactgtgacttgcgtctgtcagttcaagtgtaacagtgactacgtgcctgtgtgtggctccaatggagagagctaccagaatgagtgctacctgaggcaagctgcctgcaaacagcagagtgagatacttgtggtctcagaaggatcctgtgctacagatacaggatcgggatctggagatggagtccatgaaggctctggcgagaccagtcagaaggagacatccacctgtgacatttgccagtttggggcagagtgtgatgaagatgctgaggatgtctggtgtgtgtgcaacatagactgttctcaaaccaacttcaatcccctctgtgcttctgatgggaaatcttatgataatgcatgtcaaatcaaagaagcgtcatgtcagaaacaggagaaaattgaagtcatgtctctgggtcgatgtcaagataacacaactacaaccactaaatctgaagatgggcattatgcaagaacagattatgcagagaatgctaacaaattagaagaaagtgccagagaacaccacataccttgcccagaacattataatggtttctgcatgcatgggaagtgtgaacactccatcaatatgcaggagccatcttgcagatgcgatgctggttacactggtcaacactgtgaaaagaaggactacagtgttctctacgttgttcctggccctgtccggttccagtacgtcttgattgcagctgtgattggaacaattcagattgctgtcatctgcgtggtggt

SEQ ID NO: 19618 - DNA, 979 bp, Artificial Sequence
  Probe sequence
accaccacgcagatgacagcaatctgaattgttccaatcacagctgcaatcaagacgtactggaaccggacagggccaggaacaacgtagagaacactgtagtccttcttttcacagtgttgaccagtgtaaccagcatcgcatctgcaagatggctcctgcatattgatggagtgttcacacttcccatgcatgcagaaaccattataatgttctgggcaaggtatgtggtgttctctggcactttcttctaatttgttagcattctctgcataatctgttcttgcataatgcccatcttcagatttagtggttgtagttgtgttatcttgacatcgacccagagacatgacttcaattttctcctgtttctgacatgacgcttctttgatttgacatgcattatcataagatttcccatcagaagcacagaggggattgaagttggtttgagaacagtctatgttgcacacacaccagacatcctcagcatcttcatcacactctgccccaaactggcaaatgtcacaggtggatgtctccttctgactggtctcgccagagccttcatggactccatctccagatcccgatcctgtatctgtagcacaggatccttctgagaccacaagtatctcactctgctgtttgcaggcagcttgcctcaggtagcactcattctggtagctctctccattggagccacacacaggcacgtagtcactgttacacttgaactgacagacgcaagtcacagtgtctccaatccttaaacattccccgtcaaatttacaggtgttggtgtcacacaggaagagatcattttctctgtcatcgtaaccggagcagttccagccggtgggcgtttggcagtcacttaaggaggtagggaaagcagcgagttttaccgggcgggctatgataagcagcgtcacgggcagcagcagcagccagcagaagccctcgcaaagtgtccagc

SEQ ID NO: 19619 - DNA, 184 bp, Artificial Sequence
  PCR sequence
ggcagctggagtctttcccatttatttcttctgagtgggtgatccctccatcccctttcactgactttttccaaaacagtttgcccagaggcagagaggtgggtcctgatttctccttggtgccttccttcgcaggttcaggggttgtcacggactgtgtgtgccccgatgggttgcatccttt

SEQ ID NO: 19620 - DNA, 226 bp, Artificial Sequence
  PCR sequence
ggcagctggagtctttcccatttatttcttctgagtgggtgatccctccatcccctttcactgaattctcctccgcacctgtggggactgagtcctctttaactgactttttccaaaacagtttgcccagaggcagagaggtgggtcctgatttctccttggtgccttccttcgcaggttcaggggttgtcacggactgtgtgtgccccgatgggttgcatccttt

SEQ ID NO: 19621 - DNA, 394 bp, Artificial Sequence
  PCR sequence
ggcagctggagtctttcccatttatttcttctgagtgggtgatccctccatcccctttcactgacatttgtctgagaaacgccatcagagaggttcttggtttgctttcttctcttttgagtttcgcttctgtgggttcaggtgcagcatctccttcgttgaggtccactgtttgtaaggctgattctacttccttggactttataatctctactggtgactcacacaccacattctcctccgcacctgtggggactgagtcctctttaactgactttttccaaaacagtttgcccagaggcagagaggtgggtcctgatttctccttggtgccttccttcgcaggttcaggggttgtcacggactgtgtgtgccccgatgggttgcatccttt

SEQ ID NO: 19622 - DNA, 524 bp, Artificial Sequence
  PCR sequence
aggtccctgtcaagtgcctctgcccctgagacagccctgcgaacagctgaatgggggtggactcactacactggaatcaagaggccggttgggtttcagccgagcaagtctgaggcccctttcccgcgccctctggtggaaagtgttcgcttttctgtccacccatgtgaaggattcaccccgaccctcctcaggtggcctttactttgcaggagcaaagcaagttggatgaggagatacatgtatgtggcacacagctttcttcacttagcaacacgtcagatgcagcgtagatgtacggatgaaaccaccattgcaaaattatcactgagacagtcagagaaacctgacatggctgactccatgttgcttttagcctcacaggctggctctcttagctcattcctaagcatgggcctgaaactgccattgcaaaatcgtaactgagacagcaaaagagacttgacctaaccaactccatcttgcttctaacctccaagctgtccttgttcattcctgggtgt

SEQ ID NO: 19623 - DNA, 578 bp, Artificial Sequence
  PCR sequence
aggtccctgtcaagtgcctctgcccctgagacagccctgcgaacagctgaatgggggtggactcactacactggaatcaagaggccgacatgcctttcgccctccgccatgattctgaggcctccccaaccatgcggaactgttgggtttcagccgagcaagtctgaggcccctttcccgcgccctctggtggaaagtgttcgcttttctgtccacccatgtgaaggattcaccccgaccctcctcaggtggcctttactttgcaggagcaaagcaagttggatgaggagatacatgtatgtggcacacagctttcttcacttagcaacacgtcagatgcagcgtagatgtacggatgaaaccaccattgcaaaattatcactgagacagtcagagaaacctgacatggctgactccatgttgcttttagcctcacaggctggctctcttagctcattcctaagcatgggcctgaaactgccattgcaaaatcgtaactgagacagcaaaagagacttgacctaaccaactccatcttgcttctaacctccaagctgtccttgttcattcctgggtgt

SEQ ID NO: 19624 - DNA, 650 bp, Artificial Sequence
  PCR sequence
aggtccctgtcaagtgcctctgcccctgagacagccctgcgaacagctgaatgggggtggactcactacactggaatcaagaggccggtaaaagagacctggaaagggaaggagaaagaacagtgggaagtgcatgggtcacctgacgaacacttaaagttaactctgagaaaaatttagaaagaaagcgtgggctggctgcatttctgaaaggttgggtttcagccgagcaagtctgaggcccctttcccgcgccctctggtggaaagtgttcgcttttctgtccacccatgtgaaggattcaccccgaccctcctcaggtggcctttactttgcaggagcaaagcaagttggatgaggagatacatgtatgtggcacacagctttcttcacttagcaacacgtcagatgcagcgtagatgtacggatgaaaccaccattgcaaaattatcactgagacagtcagagaaacctgacatggctgactccatgttgcttttagcctcacaggctggctctcttagctcattcctaagcatgggcctgaaactgccattgcaaaatcgtaactgagacagcaaaagagacttgacctaaccaactccatcttgcttctaacctccaagctgtccttgttcattcctgggtgt

SEQ ID NO: 19625 - DNA, 704 bp, Artificial Sequence
  PCR sequence
aggtccctgtcaagtgcctctgcccctgagacagccctgcgaacagctgaatgggggtggactcactacactggaatcaagaggccggtaaaagagacctggaaagggaaggagaaagaacagtgggaagtgcatgggtcacctgacgaacacttaaagttaactctgagaaaaatttagaaagaaagcgtgggctggctgcatttctgaaagacatgcctttcgccctccgccatgattctgaggcctccccaaccatgcggaactgttgggtttcagccgagcaagtctgaggcccctttcccgcgccctctggtggaaagtgttcgcttttctgtccacccatgtgaaggattcaccccgaccctcctcaggtggcctttactttgcaggagcaaagcaagttggatgaggagatacatgtatgtggcacacagctttcttcacttagcaacacgtcagatgcagcgtagatgtacggatgaaaccaccattgcaaaattatcactgagacagtcagagaaacctgacatggctgactccatgttgcttttagcctcacaggctggctctcttagctcattcctaagcatgggcctgaaactgccattgcaaaatcgtaactgagacagcaaaagagacttgacctaaccaactccatcttgcttctaacctccaagctgtccttgttcattcctgggtgt
